United States Patent Application Publication US 2023/0390346 A1 - sequence listing, part 3

SEQ ID NO: 5 - DNA, 4090715 bp, Bacillus amyloliquefaciens (residues 1-2,045,358 of 4,090,715)
catcatatactgggccgtcgggagtaacgatattgactttaacggtcttcatgcttttaccctcctaggaccagattaaacttctacacccatctcttttgcattctcaatgacttcttcaatgcgtcccacaagacggaatgcatcttccggaagatggtcatatttaccggaaaggatttctttaaagcctcgtaccgtttctttaacaggcacgtaagaacccttttgtcccgtaaactgctcagctacgtggaagttttgagaaaggaagaactggatacggcgtgcgcggtgaacgacaagcttgtcttcttcacctaattcgtccataccgagaatcgcgataatatcctgaagttctttgtaacgctgaagcgttgactgaacttcacgcgccaccgcataatgctcttctccgacaatttccggagcaagcgcgcggaagtggaagccagcggatcaaccgcagggtagatacccatttcagttaatttacgctcaaggttagtcgttgcatccaagtgagcgaacgttgtcgccggagccgggtcagtgtagtcatcggcaggcacgtagatcgcctggatagatgtaactgaaccaacgtttgtagacgtaatacgctcttgaagctgacccatttctgtcgcaagcgtcggctgataaccaaccgcagaaggcatacggccgagaagcgcggaaacctctgaacccgcttgtgtgaaacggaaaatgttatcgataaagaacagtacgtcctgtccttgtttatcacggaaatgctcagccattgtaagacccgtcagtgctacacgcatacgtgcgcccggcggctcgttcatctgtccgaagaccatggctgttttcttgataacgcctgaatcgctcattcgtagaaaaggtcgttcccttcacgagtacgctctcctacaccggcgaatacggaaataccgccgtgctcttgcgcgatgttgttgattaattcctggattaatacggttttacctacgccggcgccgccgaacaatccgattttaccgcccttgatgtaaggagcgagcaggtcaacaaccttaatccccgtttcaagaatttcaacctcagttgaaagctcatcgaatgaaggagctgatctgtggatcgggtccttttgagcatccgcaggcagcggttcatttaaatcaattttatctcccagtacgttaaatacgcgtccgagagtcacatcaccgactggaacggaaatcggcgcacctgtatcaacggcttccattccgcgctgaattccgtccgtagatgccatggcaattgtacggactgtatcatcgcctaaatgaagagcaacctctagcgttaggtcgatgcctacttcattttcgcctgtagctggctgtgaaactttaatcgcattataaatcgcaggcaagtggccgtcctcgaaacgtacgtcgacaaccggtccaagcacctgacttacgcgtcctttcttcatcgctatccctcctgacaaaatctttctattctaaagcggctgcaccgccgacaatttcggtaatttcttgtgtaatcgccgcttgacgcgcgcggttatatgaaagcgaaagtgaatcaatgagttctttcgcattatcagtcgcatttttcattgctgtcattctcgcagcgtgttcacttgctttactgtcaagaagcgcgccgtaaattaagctttccgcatattgaggaagcagcacttcgagcacctcttcttcatccggttcgaactcgtaagaagccgtgcgcttcccgccgctcgttccgaaatccgttaaaggcagcacttttttctccgtcacttcctgtgaaatcgcactgacgaaatggttatacaccaaatgcagttcatcaaaagcgccgtcgataaacatttgaaccgtctgacgggtcaaatctttaatctgagcaaaagtgacctcgtcgccaagccccactaactcagacaaaatcggcatctcccgttttttgaagaaatcgcggccgactctgccgattgcaatcaccgtgtattcatctttagactgatggcgttcttgaatggtgcggtaagcgtttcgcaaaaccgaactgttaaacgcacccgcaagcccgcggtcagacgtaatgacgagatacgccgtctttttcacttctcttgagacaagcatcgggtgtttcgcgtttttcgcgccttttccgacgttaaacacaacctcctggatctatccatatacggagcaaatgacttcgcgttggtttccgcacggttcagcttcgcagcggataccatctgcatggcttttgtaatctggcttgtttttttcgttgacgtgatccttgacttaatatcgcgtaatgaggccaaagatttcaccacctttattcttcatttgcgtaaaaagagagaaaagagaacctttttctctcatcttctaagggttagttgcttggtgcaaatgtgcgtttgaagccttcgattgcagctttgaagtcttcatcagcaggaaggtttcctgttttcgcaatgccgtcaagcagatctttatggttttgatcaaggtacatgtagtactcttcttcaaaacgtctgatatccgcaaccggaatatcatcaagatatccttttgtcagcgcataaagaatggctacctgtttttcaaccggaagcggcttattcaagtcttgcttcagcacttcaactgtacgcgcaccgcggttcaatttcgcctgagtcgcctggtcaagatcagatccgaattgggcgaatgcttcaagttcacggtatgaagcaaggtcaagacgcaatgttccagctacctttttcatcgctttgatttgggctgacccgccgacacgggatacggataatccggcattgatcgcaggacgcacgcctgagaagaatagatcggattgaaggaaaatctgtccgtcagtaatggaaatgacgtttgtcgggatataagcggagatatctcctgcttgtgtttcgacgaacggcagcgccgtaattgatcctgcgcctttagcgtcactcagcttggctgcgcgctcaagcagacgggagtgaagatagaatacatccccagggaatgcttcacggccggcggacggcgaagaagcaatgacagctcacggtaagcggccgcttgtttggaaatcatcatatacgacgagaacgtgcttgccgttgtacatgaattcttcacccattgtcacccctgcatacggtgcaaggtaaagaagcggagccggctgtgaagcggatgccgtcacgacaatcgtgtaatcaagcgcgccgtgcttacgaagtgtttccaccacgccgcgtactgtagattctttttggccgatcgctacgtacacacagatcatgtcttgatctttttggtttaagattgtatcaatcgcaacagatgttttacctgtctgacgatccccgataatcagttcacgctgtccgcggccgatcggaattaacgcgtcgatcgctttgatacccgtttgcagcggctcatgtaccgatttacggtccattacgcctggagcctggctttcgatcgacgtgttttgcttgtcagaatcggacccagtccgtctaccggctgtccgagcgggttgacgatacgtccgattaattcttcacctacaggaacttccatgatgcggcccgttcttttgacctcatcaccttcgcggatatctctgtaaggtcctaagataacgatacctacgttggattcttcaaggttttgagccatacccaaaacgccgtttgaaaactcaacaagttcaccggccatacaattgtcaaggccgtgtacacgcgcaataccgtctccgacttggatgactgtacctacgtcatgaacttcaatttcagattggtaattttgaatttgctgctttatcagcgtgctaatctcttcagctttgatgctcacttaggtttcaccccttctatcgatttccccggcaagttgacgttccatgcgctcaagctttccgcttacgcttccgtcataatccggtttccaatgcggactttaatgccgcctattaaatccgtctgcacttcatttctgattctgagcgaagcgattccggctttttttgcaaacacttgagacaatgataacatttccgcttctgaaagcggctttactgaataaacaaccgcgtcctctgtctgacgggcctgattggcaagtttgataaactcgtctgtgagatcaggcacaatcgaagaccggcggcggtcaatcagaagaaaaatcgtatgcagcacagactcagacagtgcgccgaacgattgctgaatcagctctttttcttagcggccgataccttcggatggcttagcacttcctgtaatccggcttcgtttcggaacacttctttagtacggtaagctcttcttcgatttcattgatttgagaagtctcaacggcaatgtcgaaaagcgctgacgcgtatcgtttagagacagcagatccactcatcggctttctcctacctctttaagatagtcctgaatcagttgttcctgggcttgttcatcaagctctttttcaatcactttcgatgcgattaagacagaaagtgatgcgacttgctcgcgaagtgcggaaaccgcttgttctttttctttgacaatttcggttctcgccgcttctttcaatctttcagactcggcgcgtgcagcctggataatgtcttccttctgcttttcacccagttttttcgcattttcaatgagtgattgtgattcctgtttcgcttcttttaaaagaacgcgctgctcttcaatcagcttctgcgcttctttatttctttcttcagcggacgtaatttcgccggcgatatgatcttcacgctgtttcattatattttaatagcggtcccagagcgaatttcttgagaagcgctaataaaactaacatagctaacaattggaataggatatctccgccgttaaacgacagtcctaattcaagaggtaattgagacatctactacggcaactcccttctgcaggttttctctgctgataaaaagccgtttcgggacggcctgcttatcagacataaagcaatggcgaaggttctcttagagtgatcttcgccattttagttcatataaggcttttttgcttagccaaagaacgctaagaacgcgataacgacagcgataatcggaagggcctcaaccaatgcgatacccatgaacataagagttctaagttcttttcctgcttccggctgacgggcgattccctctaccgtacgtgaaacgatcagaccgttaccaatacctgcaccaagtgcacctaaaccgattgcaattgcagctgctattaaattcatgaaaaagttcctcctttaaaatgttatccgaatggatatatgattttaatgatcatgactgattttgtgtgacatgtacaccatcgtcagcatcgtaaagataaatgcctggatggtaccgatgaacaagctgaatgcctgccatgcaagcatcggaataatggctccgactgtgccgaccaaccgagaaagaaactgtttgagtagaaattcgtcgccagattcgcaagcaggccaagaagaatttcccggcgaaaatttaccgtaaagacgaagtccgagtgtcagcgtattcgcaaactcctcaatgatcttcatcgggaacataagcggaaccggtctgaggtaatccttagagtattccttcaaacctttcatcttcacgccgtaatagtgcgttaacgacacaaccataacggctagagtcagagtaatagccggatcagccgtcggtgatttccaccaaagctcgtgtccgaccgttacagaaaacggcagccctagcatattgatacaaatatgtaatcagcaggttacaccaagcgccaagaagttagcccctgtttttaaatccattgtactgcctataatattgcggacaaatcaacaatccattccatgaagttctgggcttttcccggacggatggacagcgttcttgtagtaagaatcgcaatcagcagcacaatcacacttgccacagtaatcatcagaatgtttgtcagattaaaagtaagaccaaacaaatcaatagttctgtaatcgtgattcaatgggttttcacctctcttccattgatgaacgtttgagctgataatggaatctatcataatgacgggataaattgtcattaatccaataatcacacttgccacactgactttatcgggatatttaaaggcgacagccatcgcaagtatcgcattgcaccaacgcgctgcgctcccgagtgatcgtatggactttcctttcgccacggccttgtcaaaagcattcattcttctggtcaagagccacaaattaaacaaactgaaaacagttccaaaaagaggcctaaaaaaacagttttatacgccgtaagaccatatcccagcaaatagattgctaagattacaaatacatatctccgttgtctgctgaatgtaagattgggatcgtccatcaactatctgtctcctgatgaaaatgtaatataattcctggatacggcaaaacatgcggttaacccttgcagaaggcttttttgtccgcaaaacggcctgttcgaaaaaaccactcatcctcctgatgctacgggatgctgtttcattcgcttagataaatcctcatataacgggtttttttggaggatttaaaatgaggatggatactagaaatgaaaggaatgaaaaccttctcataataccctcgtttagcatacaatagccctaacatgtgtcaatctgtttaaagttaaaaaactttttataccggagcatacacagaatgttcacaattcacctataaatgtatgacctctgccattcagctaaaatctggataaaaaaagaaaacccctgaatgaggttttccgatttatttggttccgtacagtctgtcaccgcgtcaccgaggcccggaacgatatagcctttttcattcagtttttcatcaagggcggcgatataaatatcaacgtcagaatgatgtttctgcagctcttccacgccttccggagccgctacaagacacataaaacgaatgtttctcgcgccgcgctttttcaggctgttgatcgcttccaccgcagagcctcccgtagcaagcatcggatccacgacaataaattcgcgttcttctacatcagaaggaagcttgacatagtattccaccggttttaaggtttccggatcacggtataatccgacatgtcccactttagcggccgggattaatttcagcatgccgtcaaccattccgagacccgctctcaggatcggcacgataccgagtttcttccctgaaatcactttggatgtcgctgtttgaacaggtgtttcacttccacttctttaagaggaagatcacgtgtaatttcaaacgccatcagtgatgcgacttcatccacaaggtctctgaaatcctttgtgcctgtattttcattccgaatatatgtcagcttatgctggattaaaggatgatcaaatacgtaaacctttcccatactgtgttcagctcctttttgttgtccgagtgactttttcacacttctattgattctacagaaaaagacaaacagtttcaagaaaatcataaaaaaacccgccggattaaggttccggcgggtttcttccttattaatagtccagttctttatataaaggaaacttttcagtcaaggcagatacgcgctgtttcgcttcttcaagttttgcttcgtcttcatgattttcagcgcgaggccgatgatggcgccgacttcttcaagcgcgtcaccgtcaaagccgcggcttgtcacagccgccgtaccgagacggattccgcttgtgacgaacggtttttccggatcgtaagggatcgcgtttttattagatgtaatgccgatttcatcaagaacgtgttcagcgacttttccggtcagtccgagagaacggaggtcgacaagcacaaggtggttatccgttccgcctgatacgagctgaataccctctttgttcagagactcagccaggcgcttcgcgttcgagatgacgttttgcgcatatgttttgaaatcatcttcaagcacttctccgaaagaaacggcttttgccgcgatgacatgcataagcggtccgccttggattcccgggaaaatggatttatcaatcttcttgccgaactcttcacggcaaaggatcattcctccgcggggtccgcgaagtgttttgtgagtcgttgtcgttacaaagtcagcgtaaggaaccggattcggatgaaggccggctgcgacaagacccgcgatatgcgccatgtctaccatgaagtaagcgccgacttcatcagcgatttcacggaattttttaaagtcgatcgtgcgggggtatgcgctcgctccggcaacgatgagtttcggcttatgcgccagcgctttttcacgcacatcttcataatctatatattgcgtgtctttatcgacaccgtattctacaaagttgtattgaacgccgctgaaattaaccgggcttccgtgtgttaagtggccgccgtgggagaggttcatcccgagcaccgtgtcgccgtgctctaaaatcgtgaagtaaacagccatgttcgcctgagcgcctgagtgcggctgaacgtttacatgctcagctccgaaaatctctttcgcgcggtcgcgggcgatgtcctcaacgacatcaacatgctcacagccgccgtagtagcgtttgccgggtagccttcagcatatttgtttgttaaaacagagccttgtgcttccattaccgcttccgtcacgaagttttcagaagcaattaattcgatcttagtctgttgacgcttacgctcatctttgatggcgttaaacacttgtttatcttgtacaggtaaatgtttcatcagcgagatcctctcctatccgtttcctgttctttatttttaccaccttattgtacatggtttttcaggtgaatgtaacagcttatttaaaaaaatcacaaaatttaattagaaaacacgaacattatagaggaaaagtattttcatcattcgcattcatatacggcgcgaattccgcctatcagcttcggtcttgtccgggccatcgtcacatgtgcttctccaagctcacggctcgatatccggacagggacggcaacgggtttcagatgcatgccgatgaacgtatcaccgatgtcaatcccggcgtcagcctgaatcgattcagcgagcactggagaacgcatctgccggtatgcataagaggccatcgctccgcccgctttcgggacggggacggctgaaacaatggggagcctgaaccgctcggccgtttccgcttcaatgacaagcgccctgtttaaatgctcgcagcattgaaaagcaagatgcacacccgttttttccttaaaccggttaagtccgccgtatatcaattcagcccaatccccgcttccggcggtgccgatccggcttccggcggcttcacttgtactgcacccgaccaccagcagactgccgtccgtcagtcctgcctgctcttgaaactcagtcagcatgtccgtccatttttgcttcatctcttccattgtccagcacctcttacagatttttttcttcgtaatctgcgattttgccgatccgccgttcgtggcggccgcccgtaaattcagtcgtcagccagacttttgcgatttcgcgcgccagccccgggccgatgacgcgttcgcccatcgcaagaacattcgtgtcattgtgttcacgcgtcgcttttgcgctgaaggtgtcatgggcaagcgcacagcgtatgcctttaccttatttgcggagatgctcatgccgatgcctgtgccgcaaattaaaattcccctgtcagcttcgccgttcaccactttttccgctaccggaaaagcgtagtctgaataatcgacagagccggcgccgcattcacagccatatcaatgtattcaatctgcaattcatccaaaagactttttatttcttcgcggatatggacgccgccgtgatctgacgcaatagctactttcattcatttacctcctaggtgtggctgggcgaagacagcccagtgtgcttgtcctttttattacgaaatccgttgatttcattctactctttcacattcgttttgcaaatgacctgtttgcagattttctgacagattacttgcttttcccgtcaagcaattgatcagccaaaagggtcagcagctcctccagttcgtcccgcgtctgtttataaacatcaagcggaccgccgaacgggtcagagatatcgccgctttcccccgtcacgtattctttaatggtaaaaactttgccctgactgttttgatatcggccttcaatcagctgtttatgctgttcggtcatcgccagcaccagatcggccgtctcgatatgttcttccgataagggagatgaactgtgattgagggcgatccgtttttcaaacagcgcttctacggcatgagccgacgcttttccgtgcggagacgcgaatacgccggccgagcttacgctgacatccagccctttcgtttctgctatggatttaaaaagagcctcagccatgggactgcggcacgtattgcctgtacaaacaaagattattttcatgtccgtcacctcttactacctattataaatgaagaaaaagaaacggcatcttcgtttctttttttacgtatcttatatcggtaaaagcagtttcagcccgaatccgatcaaaatggctccgccaagcgcttcgctgtaggagccgagccatgactgcacctttcttcccgccaaaaggcccgcccatgttaaaacggtgctgaagaccccgaacagcgtaacggccagaaacggattggagccgttcatcccgagactgagcccgacagaaaagctgtccagactgacaccgaccgcaaacagcaacagtcccgagcctgccggagatatgagcggcccgtccgattgtttaaacgcggcgatcatcatctgcacccctaaaatgaaaagaagagatccgccgatgtaaacggcgagcatcccagaaaaccggacagcagatgcccggccgccattcctacaagcggcatcatgacatgaaacagcccgatgacaacccctatatgaaaaatctgttttttcttcagctgaatcattcccattccgagcccgacggaaaaggcatccgtcccaaagcaaatgccatgatgcttaaggagacaagttccccgatgaatagattcgacatgaataaaaaccccttggacgtgcccgcttgtttagcttatgcatgtccgataaggggtagaacaagttaatggataacggtgccgcctgcggctttcatcagcctgttcataacggcgagccccactccggtatccggaaaggactcagaaataatcatatccacttccgcttcatcaaagctgcggagcgcatcgtataaggcggacgccactgtttcaaggtcggcgcgtctgccgcagaccttgatataatcagcctggtaactatcggcgttctcttctgttgtcaaaatgccgattcgttttccccggcttttatatgcgtctgccagttcttgaattctccgggcgccgccgtcggcaatagccatcggcgcagaaggcgcgtaatgtgtatatttcataccgggagaaataggaacctcatcttcttcggtcagtcctttatccacaagaaccggaccggcggcggattcaatctgctcttttgtcacgccgcccggacgaagcagcacgggctgtttccccgtacaggacagaacggttgattccactccgattcccgtcgcgccgccgtccacaataccggcaatacggccgtttaaatcatgagctacatgctcggccttcgtcgggctcggttttcctgataaattggcgctcggcgcggcgatcggcagtccggccgagctgatgagggctaatgctgccggatgatcaggcattctgaccgctaccgtctccagtcccgcggtgacacggggtgacagcacaccgggcttacacggcaggacaagggtcagcgcccccggccagaatagctccataagctttttcgccgtctcaggaatatggctgataaaacgatcaagctggctgatatgggatatatgcacaatcagcgggttatcgctcggccttcctttcgcctcatatattttcgttacggcttccgtattttcagcgttagcgcccagtccgtaaacggtttctgtcggaaaagccacaacctcattctgccggagcaattccgcggcttgtgtaatttggggatcggttgtggataattctgcggaacaatccacaaaccatcttcttgttttcatgtataaccaaactccttattttaaagcggtaaaactttattttctctcgtgtattccttttgaaagtataaaagatgtcctttaataaaacaagcgttatccacaaactgtggacaacactttttaataagtggataaccttgtgtataagttagatcaggcagaggttttcaccattaaaaacgaaccttctgtgcataacgagttgcggaaatgttcggacgtatacagttcctcaggcgcatcggcgcacgcttcaaatcccatcacattcagaaactcagcagatgagggctgattggcgactaagtagacatcttgaatttcatgttttttgcacagcacatccatactttgaaacagtgtaacgatatggctttgattcagcctgtccgacatgacgagtgaacggagaagcccttttccgccgctgaatttttcgatcccgagacaggcggcaatctttttttcgctgtcttccagcacgataaaccggctgatctgctgatcgatttccgcatgtgccgtatcagactttttcaaaaaggcctccagcgcctccgtatcttgatctcttgccactctcagctgataaaacatatatttccctccgtttcgatcaactctttcttccaatctatgaatcgaatccggatttatgccttttgcttcaggaaaatagatctgaaatccaatcgacgaggaaaaacttcacttcggtatcatcgtcatctttattttctttcttcgctttatcggcctttgcttttacgtcatccagcactttttctgtctgtttctgcgtttcttcctgcttctgtccgccgtcttcctgatctttcaccgcttcgccgtttgagaaatcaaggaagcacagcggcggaaacaagacgcaccaccagttggcgccctcgccattgccgagtgtaattaaaatggcttcatattttccggccggatagaccatattgccgtacagctttgtcggaaacgagattttattgaattgaactgaaacggattgatgcgcacccttttctttcatcgtttgtttggcgatttctttaatttcaggaagcttcgaacgaatgagccgccgcgcttcttcaatggaagtgatatctttcacccagtccgtgatttgcttgtttacagcatctctgatctggcgcttgagcttttgatcctcatcgttatcactgttggccaaaatcctgagccggatcgcttcatccggtatgacgacgggctcatcggctgatgcccgcgccgtttcttcttttgtcaaacccgcaagcgctcctgataataaaagaaaaatatatatgcagatcatcattgtctgtttcatcggtccccaccgttcctctccgtgctttttttatctagtcccattatggacatgacggaaaaggtttaaaccggcgggaagaaaaaaatctagcaagctgataatctgcattgacagattcaaaatatggtacgatattattttgataggaggttttcagatgaaatataattacaccgtgctgctgtcggcggcatgtatgtctgtcatttattctattttgtatgttcatcaattcattatcgcggctttcatttcgatggcgttttattttttgtttccttatttgatttttgcgctgccgcttcaatactttctgaataaaaagccgaagagatttcatccgctgtattttctttattatttgggggtgtcgttcattgcaaacgggatcatcttcggtcttttgcagccgtcaggccaatctctgttttctaattcagccttttatatctttgcggttttaacagccgtcgtctattgggtatgggattccgtattgctgcaaagacaaaatccggctacagaagcgtaatcagcagacagccggctgaagggagagcggcgcaaaagaaaacggcggccatctttaaacgggcgcgccgtccttcttctgtttcagaatgataattggcccgctgctccgctccgcttacggccagcccggaaacgatgaccgctgcgacgataagaacagccgtaacggcgccgagaatgatgtcaaagccaaacggcaggacaaatccagccgcataagctgcggcggcgagtatacatccgaaggcgaacgcttttttcaaggcggatgcccctttcattttctttccattgtaacaaaagcccgccgtgtgcgtcaccggcgggcttttttcatgatgtgatgaccgcggatacggttctgtcttttccgttgatgtcctgtacgacttccacttccgcattcggaaaggaatgacggaacaggtctttcacggcttttccctgattatatccgatttcaaagacgacaagcgctttatctttcatgacaagaggcagctcctccataaaccgcttgtagaatttcaaaccgtcaccgccgtccgtaagtgcatgaagcggctcatggaaacggacgatatccgacaaatccgccatttcttcttcagaaatatacggcggattggaaacaataatatccgcttttattcctgatgaaataaaaggagttaacagatctccctgcaaaaagcggacgtccgctccgaggttttgcgcatttctttccgccacctgaagcgcttcttttgaaatgtccgaagccgatactgaaaaatgtccgcattcaagcgcgagcgtcaccgcaatggctccgctccccgtaccgatatcaatgacgttcaggcgttctccctcagaaaacacccgcttctgtctgtccagcagatgaaagacgacttcttccgtttccggacgcggaatgagaacatcgtcattcacaaagaattctctgccgtaaaactgttctttcccgataatatattgaatcggaacgccttctttatgcatttccacatgccgtctgaatcggtaaagctcgtcctcgccgacgggctcctgcagacttgcgagaagcttgctccgatccattccggtatcatttaacagcagcagctcggccgcgtttttttctcttcccgcttcggttaaataagaagaagcccagcttagggcttcaaaaacggtcttcatcttaattttccgcctgctggagcttgcttgactggtcttctacgattaacgcttcaaccacttcatcaagcttgccttccaggatttgatccagcttttgaatcgtcaggccgatacggtgatccgtcacacggttttgcgggaaattgtatgtgcggatacgctcggaacggtcgcctgatccgacggctgatttacgggtctgatcatattcagcctgagcttcctgctggaatttgtcatagattctggcgcggagcaccttcatcgctttttctttatttttaatctgagatttttcatcctgacaggatacgacgacaccggtcggtaaatgcgtcaggcgtacggccgacatcgtcgtatttacgctttgtccgcccggtccgcttgatgcgaatgtatcgacgcggatgtctttttcgtggatgtccacttctacttcttccgcttcaggaagacacgccaccgtcgccgtggatgtatgaatacggccgcctgattccgtttccggcacacgctgtacgcggtgcgcgccattttcatacttcagcttggagtatgcgccttttcccgtaatcataaagatgatttctttgtaaccgcccgttccggtcacgtttgcttccatgacttcagtcttccagccttggatttcagcgtaacgggagtacattctgtagagatttcccgcaaacagcgcggcttcttctcctcccgctgctccgcggatctccatgattacgtttttgtcatcgttcgggtctttcgggatgaggagcactttcaaacgctctgataaggtttccgtctctccctgcagttcggagatttcttccttcaccatttctctcatatcggcatcaagcttttcctcaagcatcgctttcgcatcggcaagctgttctgatgcgtctctgtattgtctatagacttcaacggtttcttgtatatcagattgctctttcgaatattctctaagctttttcggatcgttgaccacttccggatcacttaaaagctcatttaatttttcgtatcgttgttcaattgactgtaaacggtctaacacggtcttcacctctgttttcctgtgcgtaacattctcattatagtatagggcttatcaccagtcaaaagcaattcgcctctgttatactgaagcaaaaaaggaggggcggatatgctgaaatccatccaccatatagcaatcatatgctctgattatgaaaagtcgaaagctttttacaccgagatactcggtttcggcattataaaagaaacataccgaaaggaacgggaatcttataaactcgatctggcgctggacggcgcgtatgcgattgaattgttttcctttcccgatccgcccgaacggccgaccagaccggaagccgcgggtctccggcatctcgccttcaccgtaaacgatcttgaagcagccgtcagggagttaaagaaaaagggcgtcggcacagaaccgatcagaaccgatccgctgacggggaaacggtttacctttttcttcgatcccgacaagcttccgcttgaattgtatgaagcgtaacgttttttgaagaaatgccgctttctttggcgaattccttcttgttttgtctaacatgaagggaacgccgcctcatggtcgaatacctagcaaaaaggaggtatgtgatcatgaatacaaacatggccgcgaaagagctcggcgtctccgcaaaaacggtgcaaaggtgggtcaagcagctgaatcttccggctgaacggaatgagctcggacattattcctttacacctgaggatcttgatgtgctgaaatcggtcaaacggcaaatttctgaaggcactgcccttctggacgttcaagtgccccggcagccgaaaaaacggacgggcttcattttgcagcgtccgaaaatcaatggcggcgctgaacaaaggttggcagagctggagcgcaaactggacattctcacgaaagagaaacaggatgagaaccatctgctttcaaggatagaggagcttgaacgccagctgaaacaaaaggcggatgaaggggtgtcttatcagcttcttcagcacagacgggaaattgacgacctcaataccgaattgcagacattggcctcccgcatccaggaacttgcccagacagctcccctctcagaaacagccgcttcttcagaacataagaaacccagaaaaaaaacgagattttcgccttttaaatttcaattctaatcaaaaaagctccctgaaacagggagcttttcattatgcagtcagcgcaatgatgatcggcagtgagataagagataaaatcgcactgatcacgaacgcggacgcagtttcttcctcttgtttttcgaaacgtgtggcaatcatcgccgctaccgcagatccagggaatgcgacgagcaataccgctttagtgatctggtcagccggaagtccgactgcaagagcgatcaagtacatcagcgcaggctgaacggcaacttttaacaaagcgataccgaaagccggcagactgagcttgatgttgcggataccgacagttacaccgacggcaaagagtgcaacacctgatgttgtgcttccgagctgatcaagcattttttcacccaagccagggagtgttacaccgcagagtaccaggatgatactgataagcggtgcagccgcaagcggttcggaaagaccgtgaagaatagacttaccagtcattttccagaagttctcgttttcgctgtcttgtttcttagatgactcaccgactgtagcgataatgatcgcaagcgggtcaaggatggcgttaaccacgatacccgtaacggcgataggaatcgctacttcgtttgctccgaataagcttccgagtaccggaatacccataaatgcaaatgtcggctgtgcagagtttaaagaaaatacagatgaattcgttaaatcatacttgaagataaatttgcaaaccaacaaaatgacgataaagaatccgacaatcccaatgatcaaagcgatcattaaaggaacctgtgataaaaacgcacttcttgaagtggttaaaatacttgcgataaaatgcgccggaagcgcgtacttcgtaactaaggtgcttaccccttttgctgacttcgcgtcataacttccgaagcgacctgcgaaccatcccagcacgatcacgaaaaagatcggcgccaggaggattaaaatatctaagaagctcaaaatattctcctccaaatccttaatgtccgtatactttagcctttacataaaagctttccctcggactgtaaaattaatcgtaaaaattatttagcgataacttgtttatattgcggtttccacattgcatcaagaacggcttgttctacattctcaggaatgcggtttgccacgccttctttaatggcagtttccgctacggcgatcgcaactttaattgaaacttcttgtaagtcgctcatgctcggcagaaggcctgcacccggtgtttcaaaatcaacgctttctgcgattgcgtcagcagttgccgcaaacattgcaggagtaatcactttcgcttctacaacgattgaaccgagaccaagtccagggaacgcgaatgcgttgttagattgtccgatttcatgagaaacgccattgtactctacattgtcaaacgggcttcctgtcgccacaagcactttgccgtcagtccatttgaatagatcgctaggaacggcttcagcaagcggtgtcgggttagacatcggcatgatgaccggacgctcaacgtgttttgccatttctttgacgatttcttcactgaacgcgccgctttggcctgatgtaccgattaagattgtcggtttcgcttgacggatcacttcaatgaaaggaatttgtccgttttcatcgcgtttccaatctttaatttcttcagctgtgcgcaggtacggctcttggaaatcaagaatgttttccataccttcaattaacaagcctctgtagtccattgtgtagaacgctttgttggcttcttcttcagaaagaccggcaagcaccatagtgtcgcggatttggtcagcgattccgattccggcagatcccgcaccgaagacaaccacacgctggtctttaatagacgcgcctgttttcttcatagccgcaagcacacctgcaagcgtaatcgcgcctgttccttgaatgtcatcgttgaatgtaagaatttcatgattgtatttcttcatgatattgcgcgcgtttttgtttccaaggtcttcccagtgaagaagagctttagggaaatatttaagcgcagcttttacataagcgtcaatgaaagcttcataacgttcgccttggatacgttcatggcggttaccgatgtataaaggatcgttcagaagtttttcgttgttcgtaccgacgtcaagaacgacaggaataacacggcttgggtcaataccggcagcagctgtgtatacggctaatttaccgatggcgatgttgataccgcctacaccccagtcaccgattccgaggatgctttctgagtctgtcgcaacgatcagatcaatatctccggcagtggcatgaaggttttcaaatgcctcttcgattccttctacattgtcgatagaaaggtaaatcccttgaggtcttctgtactcatggctgtattcttgaatcgcttcaccgacagtcggtgtgtaaacaaccggcagcatttcacgaagatggttttgaagcaatttaaagaaaagaacttcgttacggttttgcaaatcattcaaatacacgttttggcgaaggcggtccggctgagcttgaaactgctcgtatgcgcgttttgcctgctcatcaagagacagaatggtcggaggaagcagcccgtctaatccaaggctttttctttcttctgctgaaaacgcaacacctttatttaaagtagggatagatagaacttcttttcctcttaaagtagtttctaagttgccttccttcgttactttaatattattcaagaaaatctccttctttcttcaaatagttaacaaagttaagtaattacccattttggctagtgtgatcgcgatctgctatatctttttttgacaattattcgaacaatgtctcataactatttacattacttagtcattttatgcctgtaaaaatgaaaattcaagagatgaaaattacttaattttttcatactcttttttaagttaattaactacaatttttgaaaaaccgtcaaaaaaacaccggattttttaccgatgttttcatgaaaagggttatttatcagtctgttttttcagcacttcgtggtgatgtctgcatctcgcttcgtatgactccgacgcgccgactaaaatgaccggatcatcataggaagcgggcttcccgtcaatcaaacgctgcgtacggcttgccggcgacccgcaaacggagcagaccgcctgcagcttcgtcactgattcggcaaccgccatcagattcggcaccacaccgaacggctctccccggaaatccatatcaagtccggccgcgatgacacgatagcctttatccgcaagcaaggataaatcgccgatgattgattcgccgaaaaactgcacttcatctaccgcgatgacgtccgtgctttcactgatatgatcccatatttcagccgaagacgagatgacgtggcttgtcatggatgtgccgttgtgagaaacgacagcctcctcactgtagcgattatcaatggcaggtttgaacaccttgacctcctgcttcgcatatgtcgctcttttcactctgcggatcagctcttctgatttcccagagaacatgctgccgcatatcagctcaagccatccgctttgcttcattatgtacataggctatccgctcccctttttttcctgtttatggacataaaaaacaggcaagaagcaattcttgcctgcctgtaaaatctattattacttaagaccgtattttttgttaaagcgatcaacacgaccatcagcagaagcgaatttttgacgtccagtgtagaatgggtggcattcagagcaaatctcaacgcgtacctcttcttttactgagcctgtttcaaattcatttccgcaagcgcatttaactgttgcttttttgaaattaggatgaattcctgctttcattgtatccatctccttccgccctgaatcccgtgtggaaacagagttattattccggagcgaatccggaacgcatatgagagaattatatcagtcatttactgcatttgcaaatacattttttatcagcggcgggctgatgatgaaaggtttgcctgcttccattcttggttgatcagatcgaagaattcctgattcgtttttgtttttttcatttttctcataaacttctctgcgaagtccggagaatcagacatcgatttgcggatcgcccatagacggtcaagatgctctttcggcacgagcagctcttccttccgcgtgccggagcggcggatatcgatcgccgggaaaatccgtctttccgcaagagaacggtcaaggtgaagctccatgttgcccgttcctttaaactcttcatagatgacgtcatccatccgggagcccgtgtctacgagcgccgtcgccaaaatggtcaggctgccgccctcttcaatgtttctcgcggcaccgaaaaagcgcttcggacgatggaacgcagccgggtcaatcccgccggaaagcgtacgtccgcttggcgggataacgaggttgtaggcccgtgccaggcgggtaatgctgtccatcagaatgataacgtcttttttgtgttcaacgagacgcatcgcccgttcaagcacaagctccgctaccttaatgtgattttccggcacttcatcgaacgtcgagctgacgacatcgcccgctacggaacgttcaatatccgttacttcttccggtctttcatcaattaagagcacgatcaattcagcgtcaggctgatttgtcgtaatgctgttagcgatttcttttaacagcatggttttaccggctttcggcggcgccacgatcagaccgcgctggccgaaaccgacgggagccatcatatcgagaattcttgttgagagatagttcggtttcgtctcaagcaccatttggcggtccggataaagcggagtcagcgcaggaaaatgaacgcgctctttcgcagattccggatcgtctccatttaccgcttcaacgtgcaaaagtccgtaatagcgttcgttttctttcggcggacgcaccttgccggatactttgtcaccgtttcttaaatcaaagcggcggatctgggaagcagaaatgtagatgtcttctgagcttggcgagtaattaatcggtctgaggaagccgaatccttccgattggatgatttcgagcacgccttccataaacagaagatcctcctgctcggcgttggctttcaggatggcaaagattaattcttttttagtcagtttgctgtagtaggagattttataatgtctggccagttcatatagttcttttaatttcatattttccaaagaggaaatagatacgtctttcataaaaacaccacgcttttcatagtcaatgtattgctgttttcattcaaatcggctgcttcgcatgattccgccaaagcacattcttttataaaacgttcaggaacttctatcggtaacacttccacccatgatcggcgcttttttaaaaaaggaatgtcttaatgagttttgaaggaagcgaggacaaaaacttgagaagatcaatatttatatcgtctgtatgcggtagaatttgaaaatttcccagtactcaaaagaaggaatgacacagaaaaatcgcagcactctttatttttacctcatttcaaaaaattattcaacttaaataatgctttgacatataaatgatagggttgactcttttttgcaaaagaaaagcgggactttccgtcccgcttttctctatttatggccggatcacaagatttggttttttcttcaggctgtgtcttccgtcaacgaatcggaccgttcctgatttcgcccggatgaccaggctttcagtcgtgccgacggagcctttgaactgaacgcctttcagcagctctccgtccgtgacacccgttgcggcaaaaatggcgtcatcccctctcacaaggtcctccatccggagcactttggatacatcaaggcccattcgctcacagcgggcctgctcttccgcactttgcggcagaagcctgccgatgatttcgccgccgagcgcttttaacgcaacggcagacagcacgccttcaggagccccgcctgaaccgaagagaatgtctactcccgtatggtcaaaggccgtattgatggcgcccgcgacatcaccgtcgttgatcagtttgattctggcgcccgcctcacgcaattcagagatgattttttcgtgtctgtcacgatttaaaatggttgccacgacatcttcaatgtctttgtttttcgctttcgcaacggcttttaagttatcaatgacaggcgcttcgatatcgatgcagcctaccgcttcgggaccgaccgcgattttttccatatacatatccggggcgttcagcaatgttccatggtcggcgaccgcgatcaccgtcagcgcattccagccgccgctcgctacgatgtttgtgccttcaagaggatcgacggcgacatcgacgcgcgggccgtatccgtttccaagcttttcgccgatgtaaagcatcggcgcttcatccatctcgccttccccgatcacgaccgtgcctttcatcggcaccgtgtcaaacacgtcacgcattgcgcttgtcgccgcatcatcagcttcatcttttttcccgcggcccatccatctggcagatgctaaagccgccgcttcagtgactcgaaccaattccatcgataagcttctttccatttcaacacgatctcctctcaaaagtccgcatttctatgaattttggagctgttctatctcttcgtccgtcagcctttgccgccagattgtggcgcccagaccttcgagttttttctcaagattgctgtagccgcggtctaaatgctcaagaccggtaatttcggttacgccgtcagccatgagcccggcgacgaccagacaagcgcctgcacgcagatcgctcgcctttacttttgcgccctgaagctcggccggaccggtgataatggccgacctgccttccactttcatattggccccatccgtctcagctcatcaatatgtttaaatcgggccgagtagatggtgtcggttacgacgctcgtgccgctggctctcgttaacagagatgtcatcggctgctgaagatcagtcgggaatcccgggtaaacaagcgttttcacgtcgaccggttttatctgcttctgcccgccgagcataagaagctgatcgtcactcgtctcaatgtaaaaacccatttccctgagcttcgccgttaaagactccaggtgagtcggtatgacattatcaataatgacttctttccccatcgcggcgccggcgatcataaaggtgcccgcctcaattctgtccggaatgatcgtatgcctgcatccgtgcagctcttttacgccgtcgattctgattacattggttcccgcacctttgatctttgcgcccatgctggtgagcaatgtggcaacatcaataatctcaggttccttggcggcgttttctatcacggttttaccttcagccagtacagcggcaagcatgatattaatcgtcgctccgacgctgacgacatctaaataaatccgtgcgcctctcagcctttcggcgcgcagataaatcgcgccttgttcattggtgacttccgctccaagcgcctcaaaccctttgatatgctggtcaatcggccgcggaccgagatggcatccgcccggcagtccgatgaccgcctgtttgaagcggccgagcatcgcgcccattaagtaataggaagcgcggagttttttcactttgccgttgggaagcggcatgctgatcatcggggaagggtcaacgaccatttctcctttttcaaaatggacgtttccgccgatttctttcagcaggtcacgcagcgtttcaatatctgagatctccggaagcccttcgatcgttacttcggaatttgccagaatggttgcgggtatcaatgcgacggcgctgtttttcgcaccgctgatatgtacggttccgtttaacggatcgccgccggcaatattcaacttttccatgatagtctccttccataagaagatagctgcggagcgtaaataaaatggcattttattctgtctctgcaaataaagctcttgtccaaaatgtagccaattcgaagagaaagaatacaaggacattataaaataacaggaagaaaatagcgaagctttgcggggcatttttaacacaggatgcacagaggcccgccgggttcatattccggggaaacacactcttcactttgatactgaaggcccgctgccaaacaggaaaacataagggtgcggcaaacggatgcaaccggtttgccgcccttttcccccttatttattccagtcagccaagaattgctcgatgcctttatccgttaacggatgtttcgtcagctggtgaatgactttcagcggcatcgtaccgatatgcgcaccgcgtaaagcggcttcagtcacgtgctgcgcatgacggatggaagctgcgatgatttgagtatcaatgtcatgaatgtcaaaaatctgtcttatttctgaaatcagttcaagaccgttatggccgatgtcatccagacggcctaagaacggagatacataagtcgccccggctcttgccgccaaaagcgcctggttggcgctgaaaatgagcgttacgtttgttttaatgttcaggtcgctcagcgcttttacggcttttaacccttcagacgtcatcgggattttcaccgtaatattcggcgcgattttcgcaagttctttaccttcttcaatcatttcttcagcattcagggaaatgacttccgcgcttactgatccgctcacgacttccgtaatctcacgaagtctgtcatggaaagacacgtcagcttctttcgccactaaactagggtttgtcgtaactccggcaagaacgccaagttcataagcttctttaatctcgtcaatgtttgctgtatcaatgaaaaataacataaggaaagcctccccagtaataaattttcagaactgtaaaacatgattgcgctttctaaaggtaagacataaaaccgcctgtcaatgctgtcaggcggtttatggatgttacattggattaagcttggtttgaagaaccgaactcacgcattttgccgataaccgtttctttgatcgcttcacgagcaggtccaagatatttacgaggatcgtattcgttcggcttagctgccaatgtttcgcggacagcttttgcagaagaaatttggttttcagtgtttacgttgattttagccgtaccaagtgagattgattttttaatgtcggcagtcggaattcctgtaccgccgtgaagtactaacggaaggccggttgatttgccgatatcttccatttctttgaaaccgaggttcggttcgcctttgtaagggccgtgaacagaacccagtgcaggtgcaaggcagtcgatgccagtgcgctctacaagttcttgacactctttagggtcagcatagattacgccttcagcgatcacgtcatcttcctgtccgcctacagttccaagctcagcttcaactgaaacgccgtggaaatgagcaagctcaaccactttagctgtagttgctacgttttcctcaaacggatggtgagatgcgtcgatcattacagaagtgaaacctgcatgaatcgctttcgcacaagattcaaagcttgaaccgtggtctaagtgaatcgcgacaggaactgtcactttgtattcttccataagagctttaaccatggcaaccactgttttgaagccgcccatgtagcgtcccgcgccttctgaaacaccaagaataaccggggatttttcctcttctgctgcttgtaaaatagcttgagtgaactcaaggttatttaagttaaattgtccaacagcatatcctttttctttagctgtattcaacatttccgtcattgaaactaaaggcatgtcgaaagtcctccttatgtagcctgatttgcttcttctcgaaaaaagctttccacctatagcatgaccataaaaacctgtcatatgtaaaacaacagatcgctttttctccatctctaggataccaacttttcgacaaatcggcaacacaatgacataattgtttctaattttattaattcgattttagaggtaaatattttttcaccgcgtctctgatctcatcaatgtcaaaaggtttcgcaaaatgagtcagcgctccgagctcttttgattccttaatcatatcgagttctccgtaagcggtcatgataatgacgcggatggattcgtcgatcatcttcatgcgcttgagaatttcgattccgtccatgccggggattttcatatctaaaagcacgagatcgggccgttctttcgttacgatgtccagcgcctgtatgccgttggcggcctgaaacgtctggtacccttctttatggaacacttcattgagcaatatgcgtataccgtattggtcatctacgattaaaatcttttcattcatcattttacaccccaatattatcattttcgtcaaaaggaagcagttgtttatgtattctgtttgattttcacatttcctttaattataatagtctactttccgacattttctgagcattttctcttttgttgtatactgttcttgtatgtgtaaaggaggtttcactcatgttaaagatatttacgacgcagcttgcaggcattttttcccgcattcaggataaggagtccgatgcaatagaagacggcgcgcgcctgctggcgcaggcagccgtcagcggtcataccatttatttatacggcgcaaatgagatgcagggcattttgtgcgaggcggaactcggctcagaaccgatgccttctgtcaaagcgtttccggatacagctgattcgattacagaaagcgacagggtgctgatgttttgttcaggtccgggcacggctgaagaacaggcgctggctcaaaagctttatgaaaaaggggtcggcctcgtttgcgtatctcctgtcatcaaagatcaaaccgggattgaggaattttgtgatgttcatattgacagcaaattaaaaatgccgcttctgcccgatgaagacgggacaagatacggctttccttcattaatgacaggcctgtatgtctatcacgcgctgtcctttacgttaaaggaaatgatgcaggaatatgcctgatgcagaaaaaagacttgccgcttttaaaggaggcaagtctttttttattacttctgttctgcagcttgtacggaagcgccgataaagtctttgaataaaggctgaggtcttgtcggtcttgatttgaactcagggtggaactggcaagcgacataccaaggatggtctttcagctcgatgatttccacaagacggccgtcagggcttgttcctgagaacacaaaaccgttctcttccatttgctgtctgtattcgttgttgaattcataacggtggcggtggcgttcgtataccacttcatccgaatacgcttcgaaggctttcgtgtcttcctgaagcttacaagggtacagtccgagacgaagcgttcctccaagatcctcgacatctttttgttctggcagaaggtcgatgatcggataaggagtggacggatcgatctccgcagagtgagccccttccagacctaatacgtttcgcgcatattcaatggatgcaatctgcatcccgaggcagatgccgaagaacggaattttattctcacgcgcatacttggcggcgatgattttcccttctacgccgcggtccccgaaaccgccgggcacgatgattccgtctgtgccgccagtcagctcttgaatattgctttctgtcacttcttcggcgttaatccatttgatcttcacatcagcgtcaaacgcatagcccgcgtggcgcagtgattcaacgactgaaatgtaagcgtcctgaagctcgacgtatttaccgacaaggctgattgtaatggttttagacaagtttttcactttcgtgacaaggtctttccattccgtcatatccgggtctttgcattctaatttcatatgatcgcagacaagcttatcgagtccctgctcctgaaggttaagcgggatggagtaaaggttgtccgcatcttcacactcgatgaccgctttcgtgtcaatatcgcagaagagcgcaattttatctttcatatcttgagaaatcggcatttccgtgcgcacaacgatgatattaggctgaataccgaggcttctcagctcttttacgctgtgctgcgtcggttttgttttcagctcgcccgccgctttgatgtacggaacaagcgtacagtgaatgtacatcacgttttcatggccgatgtcgcttttcatttgacggatggcttcaaggaacggaagagattcgatgtctcccactgttccgccgatctcagtaatgactacatctgcgtttgtttctttgcctgcacggtacacacggtctttcagttcatttgtgatgtgcggaatgacctgaaccgttccgccgaggtagtccccgcggcgctcttttttcaatacggcagaatagattttacctgtcgtcacgttgctgaatctgttcagattaatgtcaatgaaccgctcataatgccctaagtcaaggtcagtctcagcgccgtcatcggtaacgaatacctcaccgtgctggtacgggctcatcgttcccgggtcaacgttgatataagggtcaaatttttggatggtgacgctcatgcctctgtttttcaaaaggcggccaagtgatgctgccacaattccttttccgagtgatgatacaactcccccggttacaaaaatatatttcgtcatttcgtttgctcctctcttcggtctgcgctacattccttaaaatgtgccgttttatagaaaatcatttcactaaaaacaaatgatgtgtaaaagaatttgggagatgaaaataagaaagctccctttcaatttcttgaaagggagcgtagcactcttatgaattctcttctttttgaagagcccaaaatacatactacatagttcgacaatgaaagtcaagatcgttttgctgatataaaatcagtctttgcgatcctcttcctcatcatcataatcttcctcatcttcttcaatcatctcatcttcaatctcaagctcgtcgtcatcttcttcatcgatatcttcgtcgtcaaagctgtctgcgtcaaggtcaatatcttcttccatttcatcgagatcgatgtcatcttcatcaacttcctcgaattcatcaaggtcgagatcttcctcaacggcttttttcgcttttttctttttcgcttttacagtcggctgtgtttcttcgtccagctgatcgtacggataccagctgcggagcccccatgtctgatctgacagagcaataaagcggccgtcaatgttgaggtctgtataaaattgggcgatacggtcgcccagttcctctttcgtaacaccgagtaaggagatcatttcattcagcagctcctggaacggaaccggttttttatgttctgagaaaatttcgtgagcgatttcaactaaagccatctgcttcagctgttcctgagaatattgtttgatactcaaggtcggacactccctttctattacttatatgtatctgtttctatcctataataagaacgaatttgtattgttttgttcataaaccatacctctcattataaacaaattaaaacagaatatgctaccctaaacagcgtaatttaagaaattttagagccgccccttcataaatcggctgatgtgcgaaaacaaagccgccggcatatgcgccggcggcccgcttctttctataaagactcttgtttttcggcgccgaatacagacatggcgagcaattcactgacatcataagtgccgatcgcgtcttcggcttctttcgctttcgtcccgtcaccgagcatggtcagacagtaaggacatccggagctgatgaccgtcggactgacagaaagcgcctgctcagtccgggccgtgttgatcctcgctcccgtttcttcttccatccacatgagccctcccccggcgccgcagcacatcccgttttcgcggctgcgctccatttccttcaattgaacgcccggaatggcttttaagatcgctctcggcggctcatacacttcgttgtatcttcctaaatagcacgagtcatggaaggtaatcgtttcattgaccgggtgaagcggttttagtttcccctgtgacacaagctcggctaataattcagtatgatgatagacttcggcccggaatccgaaatcagggtattcatttttgaacatattataggcgtgcggatcaattgtgacgatttttttgattccgtgtttttcaaattcgccgatgttgtgttccgccagctcttggaacagaaactcgttgcccaaacggcgcggcgtatcgcctgagtttttttccttattgccgagaatcgcaaaggatacgcccgcttcattgagcagctttgcaaatgaaacggcaatcttttggctcctgttgtcgtaggaacccattgagccgacccaaaacaaatagtcgaactctttgtcttgttttttcatttctttcactgtcggaatctctgtatcagcctgctcccgccagttctcccgctctttccggtttaagccccacgggtttccctgtctttcaatgcttgtcatggcccgctgcgcgtcgctgtccatcttcccttccgtaagcacaagatagcggcgcagatcgataattttatcaacgtgttcattcatgaccggacattgatcttcacagttgcggcaagtggtgcacgcccaaatctcctcttccgtgatgacctcgccgattaagctcgggttgtaatcaatggctgccgccgcttcacgcgatcctccccctgaggaagccgcggcgagctgattcgccttcgtgtgctgaaaaacgggcgcgggcacccacggagattttgatgtcacggcagcgcctttttccgtcaaatggtctctgagctttaaaatgaggtccatcggcgagagcatcttgcccgtaccggaggccggacacatatttgtacagcggccgcattcgacgcaggcgtaaaggtcgacaagctgagagcggcggaagtcttcaatctttccgacgccgtagctttctttcgtctcatcggtaaaatcgattttttccagctttccttttgaatccagcctgctgaggaacacattcgccggacccgcaattaagtgcgcatgctttgattgcggcacgtacactaaaaagctgagcaaaaacaacagatgaagccaccatgaaacataaaacacggcggcggccgccggcgctgaaagaccgccgagcacaaacgcaatggaggaagcgatcggttccgtccaagacagagaatgatcgtgccataaaaggttcatggcgttcccgagcagcaccgtcaccatcagtccgccgataaacagcaggacaagccccgctttaaacccgcgtttcaatctgacgagcttttcaatgtagcgccggtaaaacgcccagactacggcgattaaaatcagaaacgtgacgatttcctgaaaaaaggtaaatgccggataaagcgggccgaacggcagatgccggtcaggaagcagccctttcagaataaaatcaattgcgccgaactgaacgagtataaaaccgtaaaaaaacagaacgtggatgattccgctctttttatctttcagcaattttttctgtccgaacacattcacccatatcttctgaagacgttctttcaggcgtttatcaaattcttccctttggccgagcttaatataagcgatcctcgttctgatcaggtaaacgaataaataaacggcgtaagcggttacagctgaaaacagcagcgcgtttaccatgagaaatgcgttcatcttgtctccccctttgttctgattcccctcttcattgtcatatctttactttatcataaataatgaatgagtgttcagtcaataattaaattcacattctcagggcacactacggatacttcggaaaggagcgtcggtatgaaggtcatttttgtgttgcttgtcatttttatcatattgatcgcacttatgctgcttgatatgctgcttggccgggcggcgtacaaaaaacaggcgtatgagcccgtttttgaccccaaaaaaagtgatatcacactcattcactgcggcagcgagcttgtgcagcagatgacggctgatatccgccaagccgtctcttctattcatatgatgttttttattatgaagaacgaccaagtcagccatgagatgtttgatttattgaaagaaaaggcccgggccggcgtctccgtatatctgctgctcgattgggcgggcagccgccaagtgaaaaagccttccattcaaacgatgaaaaaagccggcgttcacgttcattttctaaataaaccggcatttccctttctttttttcaggctgcaaaaacggaatcaccggaaagtgaccgtcattgacggcaaaatcggctatgtgggcggctttaatatcgctgaagagtacctcggaaaaaaagcgaagttcggaaactgggaggattatcacctgcggatgaccggcgaaggcacggcagatcttcagactctttttgtaagcgacctgaaacgaaacaccggaaaaacacccgaatcacccggggtttatccggcattatccgaagggaatatctctcataggacatatgcatctgacggtttttcgcttgaatcgcattatgaaaactgcatccgtaaggcggagaaaaaaatcatcatcggcacgccttattatgtaccgagcaaaaagcttcaggaagcgcttatttcagcctgccgaaaaggcgtcaaagtcatcttgatcgttccgatgaaatcagatcacccgctcgttcgggaaacagcttttacctattatcccgagctcctgaaggccggctgcctcatctatcggtattatcaaggcttttatcatgttaaagccttcattatagatgaccgcatcagcattatcggcacgccgaattttgataaacggagcctgttctggaatgaagaggtaaatgtcatcattcatgatgaggcctttacaaaggaagtgctttcaaccataaagcaggacatcgaaaaatccgagcttctcacattagaaaaagtgaaacagcgctccgtcagacagcttcctgcagaatggctgggaaaggccatatcttactttttataaaggagaaaccatatgctgttcagattcggattcgtcgcaaacgccatgtgcctttgggacgcgtcccccgccaaaaccttaacatatgcgcgctataccaagctttcccgcagtgagcggaaagacgctctgctttctgtgacgaaagcaaatcttaccaatacgctgcgcaccctccactatgtggtcggccacggcatccctttgtacaggttctcaagctcaattgtgccgctcgccacgcacccggatgtactgtgggattttgtcacgccgtttcgccaggagtttcgtgagatcggcgggctggtcagaaaatatgacctcagaacgagctttcatccgaaccaattcacgctttttacaagcccgaaacgggagattaccgcaaatgcggtcaaggatatggcctatcattatgacatgctggacgcaatgggcatcgcggaccgttccgtcatcaacatccatgtcggaggcgcttacggtgacaaacaaagcgcgcttggccgtttccgcgtgaatctgaaagaacttcccgaagtcatcaaacagcggatgactttagaaaacgatgataaaacatatacgtccgaggaaacactcagtgtatgtgagcaagaaggcattccgtttgtgtttgattatcaccatttttacgccaatccggccgatgacgctgatttagatgacattcttccgcggatgatcaaaacatggcagcggatcggcttaaagccgaaggtccatctctcctcgccaaaatcagaatcagccgtacgcagtcatgcggactatgtggacgcgaattttattctgccggtgctggagcggttcagacaatgggatgcgggcatcgattttatgattgaggcgaaagagaaagaccgggcgctgctccggctcgtcgaagaattaagcgccatccgcggagttaaacgcctggcgggcggagtgctgaggtggaaggcataaccaggtttatcacccgttcatatggggaatttccgaaataacagaccatcagacggaggagaaaacacatgaaaaacattacatctttgaaaatagccgctaagaagttcactttaagaaacatgcttcagctttatcagctttgccacacgggaggccacgagctgtatatctactctaaaaaaacaatgtgcaaaatcaaagatatcattgagctggaaacgttcagaatggctcataaagaacaagaatatttaattgtagtggaaggaaagaaagcggtgcagcttgttgaccgtttcaaacatatcatcgaacctgcgcaaaaagaagcccattaaatacggactacataaaaaaaaggatagacaggaggctgcccggcccccgctcgtctatcctttttccattattcatgtatcagctcgccgaattgggcctgatggagtctctggtatatgccgccggatgccagcagttccttatgatgaccttgttcagcgatgccttctttcgtgacgacgacgatcctgtccgcatccttaatcgtagccagccgatgggcgatcacaagcgtcgtgcgtccttcagacagctcttgcagcgatttttgaatggcggcttccgtttctgtatcgagggctgatgtagcctcgtctaaaattaagatcgacgggtttttcaaaaacattctggcgatggaaagccgctgcttctgcccgcctgacagcttcacgccgcgctcgccgatcaccgtgtttaaaccgtcgggatacccgtttaccagctcctctaaatgcgcctggcggacggcctgccggatttcttcctcagacgcatcgagccgcccgtacgcaatgttttcccgcaatgtgccggaaaacagaaagacatcctgctggacgacgccgatttgtccgcgcaatgatgacagcgtcatgtccttaatatcaattccatcgatggaaatcacgccttcagacggatcataaaaacgcggcagcagacttgtcagcgttgattttccggctcccgaaggcccaacgaatgcgactgtctcccctgcatgaatggacaaattgattcccgacagaaccgggctgttttcttcgtaaccgaatgacacaccatcataacggatattcccttttaaaccggacacatgtctcgcgttcggggcgtccttgatatcaggctccgtttccattatttctataaagcttttaaaaccggctatgcctctcggatacagctcaataattgcgttgattttatcaatcggacggaacagaacgttcgtcagcagcacaaaagcgacgaattccccgtaagataacgatccgcggatcacgaaccatgtcccgcacaacaggacgaacagcgtgacgaatcttgtcagcatgtaactgatcgagccgtttttcgccatgattttatatgacgtcagctttgttttgcggaaacgctgattgttcacgtcaaaccgctgcgtttcaaacgcttcattgctgaaagcctgaacaagacggatgccgccgatattgttttcgaccctcgcgctgaagtctccgacgtctttgttcagttttgtaaacgcagaggtcatttttttattgaaatacaaagcaagccaaatgacgaccggcataatgataaaggtcaacagcgcgagctgccagttaatgaacagcatcacaccgaacgcgcccaaaatcgtcatgaccgcgataaacaggtcttcaggcccgtggtgggcggtttctccgatatacatcaaatcattggtgagcttggacattaaactgcccgttttgttgttatcgtaaaatttgaacgaaagcttttgcagatggtcaaaaagctttttacgcatatcggtttcaatgttaatgccgagcatatggccccaatacgtcacaacatactgaagcgccgagctgagggcgtagactccgaataaagcagcggaagtcaaaataatcagacgccaatcccgcccgggagcaatgtatcgataaagtaattaacaatcagaggaaaactcagctccatcaatccgccggcgatggcagaaaagaagtcgagaaaaaacagcttcttgtacggtttataataagaaaaaaattgtcgcagcacgtttccgtcctccttgtgcctcgttcctaatgataatatttctcaattatactatacacaaggagttttaaaagcgttttttataaaacgccggaaaataaccgcgcgaaggattccttcgttctttcccataatgtgcgcttatagaaacggacggggctgattttctcagactctctcatatcctccagataatgcgcttcaagatctttgatcgccttttgatctgtaaaaaagacattgacctcaaagttcagctgaaagcttctcatgtccatgttcgccgtcccgacagaggcgaggtttccgtcagtgatgagcaccttttgatgcataaagcctttttgataggaatagacttcgattccttcgcgaagaagctcggggaaatacgatctcgtcgcgtactgggttaaaaatccgtcattggtttccggcaccatgactcgcacccggacgcctctggcagcagcctcctttagcgctgtgcggatcggctcattcggcacgaaataaggcgtcgcgatccatacagatgattcggccgccgctatcatggcataatacagatcgctcatccgctccttcatatcggggcccgtcggaacgacttgatagacgccgccgctttctgcagggaccgggcggctgtatgctttctgatcaatcagcacctcatccgaaacgtattcccaatcaagcataaaaatgctgtggagcgtctgaacgatttctccttcgactttcatatgggtgtcccgccaaaaaccgacactttggtctttgccgatatactccttgccgacattcagcccgccgacaaaaccggttttcccgtcaacgatgacgatcttgcggtgatttctgaaattgaacttttggttgaaaaaaccgtatttcagcggcagaaacgggacgatgttcacgcccgcgcgtttcagttttttaatgtcttttccggccagcttcaggctgccggccgcgtcgaacaaaaaccgcacttccacgccttgacgcgctttttccatcataatgtccatcatcttgtgcccaagcatgtctgatttgaacatgtaatactcaatatgtataaatgatgctgccgaccggagcgcttcaaacagctccggaaatgtttcatccccgtttttgagcaccttcagcctgctttttgtattgatattcatatgagacgccttgattgaatattgaaagaaacgcttctgatttcctttcagcccggacagatcgggcgtctgttccatatcaaatatcgttctcagcttttcccggttgtatgtccgtttcgacctgaacagcttgcctttttcataaagctggccggaaaaaaggtaaaataagtacccggcgatcggaaaaaacacaagaatatgaatccataacagcgtgtgctgagaggtgcggttttcaagaattaacgaatagatgctgaacaaaataatgcttgcatagcaaagcaaccctccgtaaaactcaagcctggaaaccggaaaaaaccatatgacatatgctccgataagcatcatatataaaaagcaaaattccagtctccttttcagcatcccgactctctcccatctgatccgatatctctgtataccctctgttttccggcctgtaaacatatgaaaaatcctctccgcacgagcggaaaggattatgatgacacttcctgtgactggccggttgtgatgttctgaagcaatgccggattgagcgagcagctgcctttgattttatttttgaagatgccgatgatcagaccggtgaccgctatcgacactaaggagaagagccctttcagcaatccgacggaaaaaatgccggccagcacgacgccaaaatcgaagaggaaattaacggcacccggattccatccgcagcgcttttgcagaaataaagcgaggatattggcgccgccgagcgatgcctgatgataaaacatgagcgacaggccgaacccgatcagcgccccgccgcaaatcgccccggcaagcggtgaaacagagaccggcggcagccagtgatccgcgccggtaaacagagtcagcacagtgactgcaaaaacggtggatagagtgaatttgattcccattctgatgagagaaaatatataaaacgggatattgatcagaaagaagataatcgcaaatgaggaatgaaacaagtacgacaggcttagtgacagtcccgctgtgccgccggttaatacatgagaatgtctgagtgtcaggacgccggcgcttgtcatcagacaggcggctaaaatgaggaaaatccgcttcattcttcactctccttttgttgatattatttccacataaaacataacaggaatccccgccgcccagccattaccttggcagaaaatatcttatgtttttattttttcaccataaaaaaatccccctcttgcagggggatttttacgtgcgtttccgatagacaacatagctgcgggtcaaatacttgaggggcaggctgaacacgtgaaccaatcttgtaaacggccaaaggataaaaacgacgtaccctatgatgatatgaaacttaaaccatagcgggacactctccatcaaagaagcgtcaggccggaacaaaacaatttccctgaaccacggcccgactgttgccctgtaatcaaatcctttcgagtcaatgttgagaaacgtggccgcaacgcccgacagcatcatgaacagcagcagaataagcgtcaggatatccgatggcgagctggttttgcggattcttttgtcaaacagccttctgtatgtcaggatcactagtccggcacaagccgcgatcccagccggcaggcctgcgccgatcgccattttgtgatacgtatgctctgaaatgcccagtacagtatacacgccttccgggatcagaattcccatgacatgtccgccgacaacgaacagcagtccccagtgaaaaagtgtgctgcccgccgcaagttttttcttttctaacagctcgcttgatttcgccgtccagccaaactggtcatgctgatagcggtaaatatgcccgccgataaagatcgtcaataccatgtacggcataatcccccacaggatctgcccgctcatgcctgagcagccccttcttcagtgctttcacgtacaccgatgctttccagcgcggcctgcagcacgtgcagcagctcagcatagaggctgtcatttttttcgaggcgggaagccagctccctcacattggacaggtatttctcaaacacgcttctcgccgcttcaatctccgcaaccgcggcgaattccagcatcagcggcagataatcaggcaattctttctctgtcggcaggaaaccggattgctggtaggtgttttttaaatgcagcagttcaattccgcgctccctttgctcgcctgagttaaagtaggtgacgtacatattcgtttttttcccgaagtcgaacgtatacacatagtgttcaatcagcgcttgcggagaaaagccggctgccgcctctaaaaagtgcagcagtttctcacggatttgctgaatgccgatttcatggataagagccttccaatcgggaagcccggctctccactcttcatccggataagagagaagaatggaaagagcggagaatgtcatttgccggtctgtggtgttcatcttgttccacctcatttatcaaaagttagaaacaagagccggggccgcctgaaaatgacaagccgcagcttccttgttcagcgtataaatcagacacttcttctcgatggctgctcgggatcacaaagcggtcatcatatttggcgatcgccagcagccgatacatgtcttcaatttgcttttctgttaagccgacactggagatcagtgccgggtcgatggatttattcgtctggactgctctcatatactggcgcatgacagacattttctttaacgttgaccgaatatgatccgtatcaccggctgttaataactgggccaaatagtcaatcggaattctcatttggtcgatagccggaaaaatatcttccgccgtttgccggctgccttttccttcaaagagattcataatcgggctcagcggcggaatgtaccaaaccatcggcagtgtgcggtactcaggatgaagcggcagcgcaatcttccaatcgatgatcattttgtagatcggcgattgctgcgcggcctctatccattcagccgggatgccttgttcttttgccagtttggcaacttcaggatcattcggatcaagaaaaacgtctaattgggaatggtagagatccttttcattttcaatggaggccgcttcctccactttgtccgcgtcgtacagcatgacgccgagatagcggattctgcctacacacgtttcggagcagatggtcggcagccccgcctccaagcgcggaaagcagagtgtgcatttttccgctttgttcgtttgccagttaaaatagacttttttataaggacaggatgagacgcaatatctccatgaacggcatgcgttttgatcaacgagaacgatgccgtcttcctcgcgtttgtacatggcgccggacgggcaggaggacacgcacgccggattgatgcagtgctcacaaatacgcggcagatacatcataaagacttcatcgaattctgttttgatcgattcctccatcttttgcacgtttggatcttcaagacccgtaatgtggccgccagcgagatcatcctcccagttcgggccccattcgatattcataaaatcgcccgtcaaggacgatttcggccgcgccaccggctggtgctttttctgcgggctgtttgttaatgtttcataatcatagttccaaggttcatagtaatcatcaatcgtcggctggttcgggttatagaaaaggcctgcaagccggtttgttttcgggcctgatttcagttcaagctttccttttttcaacgtccagccgcctttatatttgtcctggtcctcccattgcttcgggtagccgataccgggctttgtttcaacattattgaagtacatatattccgcaccggaacggtttgtccacgtgtttttacaggtgacgctgcacgtgtggcagccgatgcatttatccaagttcatgaccattccgatctgcgctttaatcttcaagccaatcgacctccttcagcttgcggatgacgacattcagatcgcgctgattccccgtcggaccgtaatagttaaagccgtagctgagctgtgcgtagcccccgatcatctgggtcggcttgacgtgaatccttgtcgggctgttatgggtgcctccgcggttattcgtcagttttgtgccgggcacgttgatgtggcggtcctgggcatggtgcataaacgccattcctttaggaatccggtgagacaaaaccgctctcgccacgacaacgccgtttcggttgaagcattcaatccaatcgttgtctttgatatccgtgtcctttgcgtcatctttattcatccacacggtcggcccgccccggaacagcgtcagcatcggcagggaatcaaaatacatgctgtggacggaccatttattatgcggcgtcaaataattaagaacgatctctttgccctcttgatcaggccgcttgctcaggaacggacggtgctggaggatcggtttaaatgtcgccatcgtttcaccgaattccatcatcagttcatgatcgacataataggattgtctgccggtcagtgtcctccacgggattaatttttccacattcgtcgtaaacggcgagtacctgcgccctcctttttctgagccggtaaaggccggagacgtgatgaccgttttcggctgggctgtaatttgctcgaacgtaaagcattcttcctcgcgttcttccgccaggtctttcagcttcaggtttgtgatgttttcaagcgattcccatgcttttacggcgacctttccatttgaggtggacgacagggttaaaatcgcttctgccgcctgctttgcttcacttatattcgggcatcctttggcaacgccgtctgaatcggtttctcccagtctctttttgagtgattcatattcatccgcaatcgaccagctcatcccttttgttccgctcggttttaaagccgtatgagggccgagcgcggtcattttatgaaaaatgtgtttgtaatcccgttcagcgacttggatattcggcatcgtttttcccggaatggcttcacattcgcccttgctccagtcattgatttttccgaacggctgggccaattcctgcatcgtgtcgtggaggagcggcgtcgcgactacctctttcaccagctccatatcgacttcttccgccaggtcggaaacggcttttgacagtgctttgaaaatatcccagtctgacctcgattcccacggcgccgagatcgccggagcgaatggatgaatgaacgggtgcatatccgtgctgctgagatcgtgtttttcataccatgtcgctgccggcagcacgatatcggaatacagcgccgtaccggccattcgaaagtcgagattgattaacaagtcgagcttgccttccggcgcctgctcccgccatttgatttcttcagggcggatgctgtcgctgtcgtcattcatcaaaccgttcgtcgtccccagcagatgcttaagaaaatattcatgcccttttcctgagcttgagatcagatttgcccgccatacaaagagattccttgggaaattcacttcattgtccgggtcttcaatcgcgaatttcagttttttctcctgaagctgtgaggccacgtacgcacctacgtcttcaggtgtcgccgcccccgccttctcagcttctttgtacagatcaatgccgttttgattgaatgtcgggtaggacggcagccaccctaatcgcgccgccagcacattgtaatcggcgtgatgcttgtagcgggatgaagaagcgatcggtgaagccaagtcactgatcggctggtcttcgtaacgccactggtctgtcgcaaagtagaaaaatgaggtgccgttttgcagtttaggcacgccttcccagtcctttgcggttgcgatcgtctgccacccttcagcaggacggagcttttcctgaccgacataatgagcccagcctccgccgtttacgccttgggcgcctaccaataaaacaagatttaacaccgcgcggtaaatcgtgtcggagttgaaccagtggttgattcccgcccctacgataatcatcgatctgccgtctgtatcaatcgcattttgggcaaactccctggcaatctgtataacggcttctcttttaattcccgtgatctgttcctgccaggcaggtgtgaacggacggggatcatcataagatgcggctgattgtccgccgatgccccggttcacgccgtagttggccaatatcaagtcaaatacagtcgtgacacacacctcttcaccgttcagttccagttttttaataggaagattccgctcaagcactttgtttccgtcatttgaaaaatacggaatgcgcaccgtactgatttcgtcctctattccgagcacggagagacggggctcgatctgttccccggtgtcttcatcgatcatgtgcagattccatttctgctgcccgtcccagcgggagcccattgttccttgcggtatggcaaacgcacctgtctgttcattccagaccgccggcttccattgatcatgctttgtctgccgtccgatatccttcgcatgcagaaaccgtcccgctgtgtatacgccattttcttttgataaggtgacgaggaatggaaaatccgtgtattgcttcgcgtattccatgaaacgttccgtctcttgattcacgtaaaattcctgcagaatgacgtgacccatcgccatcgccagggctccgtcagtcccttggcggatactgagccagtcatccgcaaactttgaggattccgcaaaatcgggactgattgaaatcaccttggcccctttatagcgggcctccgccaaaaagtgcgcgtcaggcgttctcgttaacggaacgttggaaccccatgtgatgatgtagcctgaattgtaccaatcactgctttccggaacgtccgtctggtcaccccaaatttgcggggacgccggcgggagatccgcataccagtcataaaaactgagcattgggccgccgattaaagacatgaatcgcgaacctgacgcgtggctgatcatggacatcgccgggatcggagaaaaaccgacattccggtcaggcccgtatttcatcactgtatacagcagagaggctgaaatcagcttcagcacttccggccattccgcgcggacaaagccgcctttccctcttgcctgtttataggacttcgctttttcagggttttcaacgatcgatttccaggcatccagcggattttgatgcgtctgcaatgcttcccgccacaaattgatcagcacacctcgcacatatggatatttcacacggagcgggctgtagatgtaccatgaaaaactggccccccgcggacagcctctcggttcgaaatcaggcatatccggtcctgttgatggataattcaagttttgtccttcccacgtgacaattccgtttttcacataaatattccagctgcaagaacccgtgcagttgacgccgtgggtggagcgaacgactttgtcgtactgccatctgtttctgtatacattctcccaatcacgatcttcgcttgtcgtttggctatgtttatttgaatgatgttcgataggagaaaaatagtttaatctcctgagcaacggactcattttctttttcttcatgatcgttcactccttccgagtcaggtgatgctatgtacactataaacagagacggcgcatcaccttgtgaactaagtcacacactctgcttttttcacaaaacgttcacacagagcagcaggaaggatttttaaacgatatgaggacgcccgcgtcatcaaaaaaaccggttctgtttaagaaccgggttcggcgttttcatccagtgatgtatgcagataccgcaaaaacaactgataggaacagaagacattttgctgaagcatcgccaaaaagttcatttgcagccgcggatggtaagacatcatttgcttaaatatagaatatggaatatggagtaccagaatatccggtgaggcattgactgagataaaaggcgataaagagagcccgcctttttcatcaatcggaaacacatcgcctttttcccacagcgcaacggtttgcgacccttcagggagcctgctgtccgtaaaacggatattgccttttaatacaatataaacggattgtgaatgaagaaaggatggagattggtcagatgagccgcggataaacgtcccgtttttcagcaaggtttcgacaatggacagaggcacttcattaaacataggaagttgtttcagaaataataaatagtcacactgattcataggaaagcctcctgtgctattgatagctttagtgtagcccgattgagcccgcgcggcagtgatgtatttcacagcttgtatgatgaaagtcacttatcaggagagtgtttgcacttataatgaaataaaaaggagggtttcgatgaaagcgatgattccgaagcagcacggcgcatgggcgatgctgctgattccatttttactcggcatggtcaagggaggcccggttttctggcatattccgctctttctgggctggctgttcctttacttgacggtttatcccgtttcgctcgctttgaaaaagaaacagcttcagccttatcaaaagtggatatggtattacggttttccggcctgctgctttttgatcatttctgtctttcataagccgcagctcgtctggatcggcgtttttttattgccgctgtttctcatacatacgcattatgcccgccgaaaaaacgaacgggcgctcacgaatgatattgcgggagtcttgttcttttgttcaggcgggcttgcgagctgctggctgggaacgggaatccttgacggctgggcttggtttctattcttgcaatccgctttattttttgtcgggagttctttttatgtgaaatcggtcatacgggagagaaaaaacagaaggtttgcttactggtcgtggggatatcacctcttgctcccctttttatcggctcttctcggggcaggctgggcgtttctcgcttttatcccaagcagtctgcgggcctggttttttcacggaagagactggccggtgaaaacgatcggcattctggaaatcgtaaatgccggcttctttttcgccgtcatgtgtatatgtatcacaagctgaaaaacaaggacaccggctgcccttgttttttcagtcaatattgcagatctcaagcggacaattttcacactcgatctcgcatcgtaaatagtcccgcttgtgcaaaataatttttccggtttcgtctatcgaaataaccccttgtttgcggaggtctcccagcatgcggttgacgctctcccttgccgccgcgcaaaacttagccaaatcctgatttgtcagcacaatgttaatcagaatcccgtcgcttcgttccaccccgtagctgtttgataagcggataagggtggaatagagcgccccttttttgccgtgaagaagcagatccctgatcttagactggatttttcgcagatgggtgctcatccatttcataaattcaaacgtcaaaacaccgttttggaccaattccttttccagcctgtttttattaatgacgagcacctccccgtcctctaacactttcgcactgagcatatatctcggctcatctgtgaatagcgtcaattctccgacaatatcgtgtttttggcagattctaagtgtcaggtcttttccgtcagatgtcagcttgccgatttcaatgagtcctgattgaatcagataaagctcttctgcatccattccttcttgaaacaaatacgtgtgttttttcattttccttttcgtactgatcgattccagcaattcatgcagttcgcgggaaagaagttctttatcagattttcggacagagagaatattcatgagctcacctcgaagaaagtcacgttgcgtatgtatattgtaacgtgacttgatttgcactcacccagaaaaaactaacaatcttgtgaatggatcattatgaatcaaggctatgactgtttctctccgtatgtgttttcattctttcctgccaatacatccagatcacaaggacaaagctggctaacgcaacctctgaaagcgccataaacccgatcgcgtattgacccgttgcctgaaatacacttgccagaatcagcggagggaaaaaaccgcccagtccgcccatggcagacacaataccgttggcaatcccagcttgcttcgaaaaatagaaaggcaccagtttaaataccgtcccgtttccaatccctgagcagactgccaccgtcagcgatccgaacgcataaaggccgatcgccggggagaatgacagcatgacgcctgacagcgtaagccctgcgaaaacgaacatcagaatgcggagcgggctcagtttatctgcaagaaaccctcccacaggcctgagcagcgtagagaccgcaataaagccggccgtccgcagaccggcgtccgcagggctcagcccaaaatgctcaaccaaaaaattcggaagatagatggtaaaggcgacaaaggcgccgaacgtaataaaataaaacaggctcaacatccacagcacatgatttcggtaaacggctttcatttgtgtctttatggaaactttgactttcttctcatgccggtcgccgaacaaaacgtgcagtaatgcgaaaacagccagcaaaacaagatacatctgcacggttgctttccatcccgcggcttgagcgataaccggcgccgcaaaggtagtaacggcggtcccgatgtttccggcaccgtaaatcccattgacgacaccgtgcttttctttcggataatatttcgggagggacgtcactccgatggagaataccgctccgccgatccctaagaaaaagccgcccgtgattaaatcaaataaagaatccgcgatactgatccaaaatacgggaaacaaaagcaggatgaagctgatcataaacatcagccgcgcgccatacctgttcgttaaatatcctaaaggaatacggagaagcgatccgagaataacgggaatcgccgtcaccaatgaaatctcgcctttgcttaaatgaatatctgatgtcatttgagaaatgagcgatgaaatcagcacccacaccataaaccctgccactaagcttaaagactgcagcgataattgaatatgttgacgattgatcattcggcttgcccctttcactgattcaatatcagtcttatcatacaaaaactcagtgtgctggattgtgaattacatcacacgctttatatgcaaaaaaaagaacaaagcccgaagactttgtcctttgatcatcattacattttttccggagcggatacgccgatcagctgaagcgcattgttcagcgtaatttgcgtcgccttcattaaagcgagacgcgcgcggctcttctctttattttccggatcgatgactttctccgcattgtagaagctgtgcagagcggaagccagatcataaatatagtttgtgacacggtgaggaatgcgtttttctgccgcttctgccactgcttcagggaagccgccgattgttttcagcaggtcatattctttttctgattgaatatggctgaaatcaagatctgccgccggtttaagtccctgctcctccccttggcgaagcatgctgcaaatacgtgcatgtgcgtattgcgcataatacacagggttttcattagatgtggatacggcaagatccaagtcaaaatccatatgcgtatcagcgctgcgcatcgcgaagaaataacgcacggcatccaagccgacttcttcaatcaggtcgcgcatcgttacggctttccccgtacgtttgctcatcttcattttttcgccgtttttgtataaatgaacgagctgaatgatctcaacttccaatgtgcctttcttgtaaccgagcgcttcaatcgccgctttcatacgcggaatatacccgtggtgatccgcgccccatacattgatgagcttgtcgaatccgcggtcaagtttgtctttatggtatgcgatatccggcagcagataagtgtatgagccgtcttttttgatcagcacacggtctttatcgtcgccgaacgttgtggagcggaaccatgtcgcgccgtcctcttcgtatacatggcccttttcgcgaagcgcctcgagcgcctgatcaatttttccgttttcgtacagtgacgtttcagaataccatacgtcaaacggcacgcggaagttttccaggtcggagcgaagtttatcaagctcgtactttaagccgtattcacggaaaaacgcctgacgttcgctctcctcttcatgtacgaaacggtcgccgaaatcttcggcaagctttttcccgattgctataatatcctcgccgcggtaaccgtcttccggcatcggtttctcgaggccgagcgcttcaaaataacggacttcaacggaaagcgccaggttgttaatctggttgcccgcatcattaatatagtattcacggctcacatcatagcccgctttagaaagcacgctgcacagcgcgtcacctaccgccgcgccgcgcgcatggcctaagtgaagatctcccgtcgggttggccgatacgaattcgacctgaatcttttcgccttgtccgatgtttgtctctccgtaatgttcacccgcttcaagcacggacggaatcagttttgttaagtagctgttgttcatgtaaaagttgataaagccgggccccgcaatatccatcttttcaatggaagctttgcctttatcaaatgacgccacgatctcctcagcgatttggcgcggcgctttttttgcgattctcgccagctgcatcgccatgtttgtggaataatcaccgtgtgttttgtctttcggcgtttctaacagtacgcttggaatctggctttcttccgccaggcccgctttcagaacggccgctttgatctcttccttcagcacgtccttcatttgttccgcaatattcatgcctttgtttcctccttatattggatcgtcatgttatgtacatgttcttggttttcgcctacagtcatgttatatgtcagtttgacggagccttccgaaccgccgacatcagattgaatgtttttcgtttccgtacggagctccatttgtccgaacggcagtttatattgagtgagtgtcgatgcccccggaatgaaccgctgtttcatttggatggcgcccgatctcattacgagaatctctttttctgtaatcttgacgaccgttttaatcttgcccaaatcatgctcttcgtgataggaaagatacgttttgccgtttctcacgtaatagaatccactcgatgtaaattcaaccgactcttcttcggagccgttatgaatgaatgattgcacatgaatggctactggtgtctcctgtctcatgctgacacttccttttcatcatcccgcttaacctgaatagtataagttttcaagggaaaaagttcaaccgcttcctcctatcttaccatctttgctgattggttttgaagataaacatgatttttaaggaaaatgaaaaaaccggaaatcctaggctgcgggataaatgcggttccttcggcggacggctttgtcaaaggggaaaagtttgcggtatttttgcgctatccttccgaatgaaaatgataaaatatgtcatatacataacgtggaagggagggattcggaatagtggcgagtgttttatcgtcttcagcggttggagaaaaaatcaacgaatggtatatgtacattcgaaggttcagcatcccggacgccgagtacttgcggagagaaatcaaagaagagcttgcaggcctggaagaagatcaggatcttcatctgtactattctctcatggaattccgccacaatctgatgctcgaatacctcgaaccgctggaatcgcagcggatagaagaacagccgagactatcggatctgctcgcggatattgataaaaagcaggcccggctgaccggacggcttgattattattttaattttttccgggggatgtatgagctggatcagcgggaatatttgtcggctataaaattttttaaaaaggctgagacgaaactctcatttattaaggatactattgataaagccgagtactttttcaagatgtctgaagtctactactatttgaaacaaacgtatgtatctaccgattacgcaaggcaggcatatgaaatatataaagctcagtcgtcatacgatatcaggctcatacaatgccaatccttattcggagcaaatttcctggatttaaaactatatgatcgggcaattactcactttcaaaaggctttttctttggcagaaacagaaaaacagcctcaattaatgggcaggacgctgtataacatcgcactttgcaaacaaagcctgaacgactatgaagcagctataacttatgttgaaaaagccattgatgtttttgaaagtgctaaaatgaccccttctttgccccaagcatattttttaatgacacagattcattataaattagaaagatacgacaaagcgctcgagtatcataaaaaaggagttatctattccgaagagtcagcagattcagtttatttacatgaattcgaatttttaaaatctttgtatgtgaacggacctgatgaggatgcaatgaaaaggagttttgactttttggaaagtaagatgatgtatgcagatatagaagattttgctcttgatgcagctaaatattatcacaaacttgaagattataaaaaagcttcaacatactttttaaaagttgaagaagcaagacagcatattcaagggggggtaactttttatgaagctgaagtataaggtcttactcacttgcttagctgtaacctcagtttttataacagcagatatgacgaatacaccttcacaccaattcgaagtagcacaaagagctatgatttaaatgataattacttttaggcttgcaggttaaactgcaagccgttttttatataaacaactaatttacaaaaacaaaaaacataccttagaactcaaatgtgtaaaaagtatttgacacttatacatatattatttaaaataaatatatataaatttgaaaatttaaaataaaaaacaaaataagttaaggagggttttagtggataacaatataaaaaaacttagaacagcagctgatatttcacaaaatgatctggctaagctctgcaatgtgaccaggcaaaccatcaatgcaattgaaaataataaatatgacccgactttaagtctggctttttcgatagctcacgctttaaatacgggaatagataaagtattcaactataacgccaaaaaaaattaagggagcggttcttatgaagaaaatggatgagatgcaaaaacaccaatcgggtacagccgccagaatagcatttagtttttatactgtcgctttactgatatggtcattaatagattattttaaaaacggaaatacaggatggcaatttccgattcttttaataggctgcgcgctctatttatggattcaagtttatcaaaatcgaaaaacaaggtaacgattccaatacacttccggaggattatacagcaatgtacgaatacaagttcataaaagcagaagtaaaccgatggaaaggaaagcctaaagaagactataaataaattattgaaaagtattcgcagcaagggtgaaagctggttcaaatatttgctcctgctatttcaggctatggggcagctgattattttgatattatttttgaaaaaaaagtataatgtttcagtaccaaagaaagccggatcatacatatggtccggctttctttgtacgaaataagccagcagatacttttacggatttcacctcttaactattattttttcggaaatccgcaattcaaatagattccaatatattttattatttaacttgctggggatattgaaaaaattggaggaaaaaatgaatctacttttaaaaacacaaaatagtaaagcgatttttacattagtagcatcaggaatcattgttctcgctcttttcagtatgaaacataatcatttaagcatggatgttatcgatattttaaacagagctggaattatcgctcctagttggattgtcagtgctatcaccgcaacgggatcagttctggctatcattactgttttaggatctcttggtgcaggcttgccattggccgttttagaacaattggctgcagcaagtacagcagcagcataatataaaacattaaattcaatatccctggcagtccctttaacgaatggatgaaaatacattgtttaaaaagaatgttttagtcaaattgtacatactctgtctgatcttatttttaattgctttatttacagcatatatttatacagattccgcttcaaatgtaaataatctaaatcgaaatatccgtccggatttttttcagattttctttaataatattaaagtagcgagtctgcttgtttttttaggcccgttaacgctgtcgcttggcacggttgctgttttaattattaatggattaattttaggaaatgcgataggaaacattaaagacaatttaaaccttttactgcttgttataccccatggaataattgaagtgccggtattgcttcttgcagcctctgtaggaatgaaattaactttagatttattactcctcaaaataaatttgaaattcacttttaaatatattggtattatatttctcggtttaatgatagcagctatgttagaaacatttattacacctatctttataaaaggagcctcttaggattatgcaaattgaattatcttcatttaaggaacgaaacattaattttttgtcctcgtttttgttttatattatcgggttagctttttatttaagttcccttttaccttttatgaaaagtttaattcccaaaaacatccctatacaagttgttgagcaagtaaaacatttagattacatcattgcaatagccgcactgtttcttttaatgttcggggtcatttttgaaggattcgtattatttctcattataaattttcttggcgctcagattaagatcaaaactttttattccctatttatgttttctaacatcccggtcgcgattaagttttttcttatatcattcaaaaatattttcgcacaacatccaaacactagtttatttttcacaagtaatcatttgattttttctatctttgatttgttcaatattgcatacttatttcttttgtttattcttctgaaatggagaacaaatttgaactacctgacaatctcagtttttatttttacggcattcctgtatagaatgtttttttagcatatataaataaaccccctcaataggggtttttctttcatttcgttcactgtatacaattccttttatatgcttccgaaacaataccgactctagtacttacattccactttttacaaagaccggctatgatatattcgacattacgctgcgagtagtttaatgacttagcgatctctttattaggcttttcagcaattatcagtttaattactgaaatttcaatcttttttaattccaattcattttctactgctgttttcattctaacttcctttctaaagatgtatttactaaataataccctattatataatttttatcaataacatcaattattaatagtaaaataatatatttcttttactaacttctaagtagtttatatacaatataaaaatcccccgccatgtttcaagcgggggaaattctttctatttcacaaacccaagcagcatttcacggatcatcttgcttgccgtgtttgcggtttgttctgagtggtcatagaccggtgccacttctacgaggtcggcgccttttacgctgacctctgagcgcgcgatttcatggatggacgcgagcaattctttagacgtgatgcctcccgcgtcaaccgtgcccgttcccggcgcatgagcggggtcaagaacgtcgatatcgatcgtgacataaaccgggcgtcccgcaagctgcggcagcacttttttcagcggctcaagcacttcaaacttagaaatgtgcatgccgttttctttcgcccattcaaattcttccttcattccggagcggatgccgaatgaaaatacgttttgcggcccgatgagctcggccgctttgcggatcggagtagagtgggaaagcggttcgccttcataatccgtgcgcaggtcggtgtgcgcgtcaaaatgaatgatggcaagatccggaaacttcttatacatggcttttatgacaggccatgatacaaggtgctcccctcccatgccgagcgggaacttgcctttttctaggatgccgtccacgtattcttcaatcatatcaaggcttctttgcggattgccgaacggaagcggaatgtctccggcgtcaaagaaattcaaatcagccaagtcacggtcgaggtacgggctgtattcttcaagaccgatagacacctcgcggattctccccgggccgaatcgtgaaccgggacggtagctgaccgtccaatccatcggcatgccgtaaaggatggcgtccgcctctttccagtcggggcggctcgcgataaatacttttcctgaatatgcttcatcaaatctcatcaataattccctcgctttcctgtaaaaaagcgcaagattcgctcctgcgccgtacgtttttatttgattaagtcgctcacaaatttcggaagaacaaatgccgctttgtgaagctctttcgtgtaatacttcgtgtcgatgtcgaagaaacggctgtcctctacttcaagcggatcgtactttttagaaccgatcgtaaatgtccacaggccgctcgggtacgtcgggatattagccgtatacagacgggtgatcgggaagatttctttcacgtcacgctgtacgtttgtaatcagttccggtgtaaaccacgggttgtccgtctgcgcgacgaagatgccgtcttcttttaacgccttggaaattccggcatagaagccttttgagaacagattgacggccggtccgaccggttctgttgaatcaaccatgatgacgtcatactcattttctgatttcgcgatgtgcatgaaaccgtcatcgactctcacgtcgacgcgcggatcatcaagcttgcccgcaatggacggaaggaattttttagagtattcaataaccttgccgtcaatgtcgacaagcgtcgctttttttacgcttgggtgcttcagaatctctctgatgacaccgccgtctccgccgccgacaacgagaacgttttccggattcgggtgcgtaaataacgggacgtgcgcaaccatttcatgatagacgaattcgtctttttcagatgtcatgaccattccgtctaagaacagcatgttgccgaattcttctgtctccaccatttccagatgctgaaattccgtctgttccgtatgtaatgtttgtttcacctttaatgtaatgccgaaattcttcgtctgcttctccgtataccaaagctcgctcaattgtcatctccctttcaaggcttatttcatttattgtaagcgtctgtatcgcttttattccggttaaaatctcattttcacctaaggaaaaagtatagaggatggaggggaaaaagtaaagaagtgtccggtttgatatgtttaaaaaacccccttttttcacataataatagaatcatgaaaaagggggttcccaaaagtggataaagtatctggaaaacagctcagaatcacgttcaaaatcatccgcgcctgcatctttctgacactgatcggcggaatgctggccggcgtctgcttcacatccgttcttcttgcagcgaaatggcagggcgccccctccgtccgggttcctcagtctacgattctttatgcaaatgacggctcaaagctaggtgagaccgatttcggggaaaagcgctactgggttcggttaaaagatatcaatccgacagcggtgcaggccgcgattgcggtggaggatcaaaacttttacaatcaccacggttttgattaccggcggatggccgccgccgcgctggctgacataaaggcaatggccaaggttcagggcgccagcaccatcacccagcaatacgcgagaaatctctaccttgagcatgataaaacatggaaacgaaaatggaacgaagcattttacacgatccgccttgaacagaactattccaaaaacgagattttagaaggttatgtaaatacgatatattacggccacggcgcatacggaattgaagccgcctcccgcctgtatttcggcaaacacgccaaagatctgaacgatgcggaagccgtgcttctggcgggcataccgaaaggcccgtccggctattcgccatatgtcagtgaaaagaaggccaaacagcgccaggaaaccattctccgtctgatggccggacaaaaaatgatctcaaaagaaaaggcggaaaggattaagaaaacgccgcttgcctatcagccgctgaaaagcagaaccgcggcgaaaacggcgccttatttttacgatgatgcgatgaaagaactcgagaaaaagctcggcatgacgcgcgaacagctcgcaacgagcggattgcgtgtttatacaacgcttgataagcgcatgcagcggatcgcggaaaacactgtggcacatacgatccgtaccggctctgacattcaggtcggcttttccgcgattgatccggcaacagggcgcgtgcttgcgcttctcggcggacgtgactacgaaaaaagcccgtttgaccgggcgacacaggcgaaacggcagccggcttccacgatcaagccgcttttgtattacaaagcgattcaaagcggctttacaccggtcacgctgatgaaaagcgaagccacagagttccagattgacgacaacggagatacctattctccaagcaattacaacggctactacgccaataaaccgattacgctgcttcaggcgcttgcgttatcagacaacatttatgccgtgaagacccatctctttctcggcatgaataagctcgtgtcggcggcaaaggaattcggcatcagcgaacatttaaagccccttccgtctctggcgctcggaactgaacccgtgcgcccgattgagatggttaatgcctatgcgatgctcgcaaacgggggaaaacaaatcaccccttcctttatcacaaaagtgacggataccgccggcaaggtcttgtatgaacagccgcgcggacatcagcagacgcttgataaaaaagccgcttttgtgacggcgagcatgatgacgggcatgtttgatgaggatttaaacggctatacttccgtcacgggacgcaccatttcagaccggctgacccggacgtacggcgggaaatcaggcacgaccagcgcagacagctggatgatcggctttaatcgggctcttgccgccggtgtgtggacaggctatgacaaaagcagcacgattgattcagtagaagaaaaaagctatgcgaagacgatttgggcggactttatggagaaggcgctcgaaggagaaccggaaatagcgcttaaaccgccgaagggcgtcacgggcgtctatattgaccccgcttccggctacacttcgggacccggatgcgccgcaaagcattacacgtatttcatcgcaggcactgagcccgcggatgtgtgctacggaccggaaccgtctaaaaaagaaaaggaacacgtccccgcccgtaaagaagctccgcgcaaaaagtggtgggataagtggctcggcaaaaaagactgagcccggtgcattgcgcgccgggcttaatccgcgtcttcctcaagcacccatgggagcaagagtgaaaagtcgagatggataatagggtcaggaaaacccttcggtataaaaaatgttgtactaggcaaagaaaacgaaaagcggatatctcccgctctctcaatgtgaaacttcggccagccttccctaagcatgccgacaatcggatagctgcccgcataatgatgcaggccgttttcctttccatgctcccccaaatcgtgacagacagccggacgaatcccaaactgcgtaaacaatcttgttttctcggcgggaaggagattcaccgcctcggaaaagttccggcagctcccgcaatcgcagggatcagcccatgatttttcatattgttttctcgtttccgccgtatctgcttcaatgatccaaggcccgatgtcaaagacggtgaacatgatgaaacctccgcgtaaacatgaaaaaccccgagtcttggttcggctcgggactttccatgtcctgattctgtatcaacagtttactcagtacaattgcgaaatagtgcaaatatttataaagttcacaaaaagttcacaaattatttttcgcccggaagcagacctgttttcaattcatcggatgaacgttcccagagcccttggtcatgcttctgcagaaattcagcaagcacctgctttgagctggcgtccattttgtccacgataatgcggcgcttcattgatttatccattaaattcacatgctccggcaatgacttatagcctctgcggatacttctgtccacggtcatttcacaagccgtcacacccgcgtaataagggccttctttttttctgtcgatggtgacccacacgagccagtacggttttccgttcggcacttcatctttgttcggcaggaatttgatgcctttttcaacgacactgcgggcatgcattgcgccgatgtctacgaaagcttccttctcttccacatcgacaaataccggagaaatattgtcaaggctcagcgacccggcgccaaaaccgccatgtccgtcggtcggatcacttttaataatattaaatccgattgttttcttctttttttcttccatgaaaataccctcctacaaaagcggttgaaatataatggcaaataccttgagaatccagtctctcccctcgcttaacagcggccacacgacataggagccgaccggtgtcacaaacagcacgagaaacacgataatcccgtagctctcaaactgagtcattttggcgcgcacccgcggcggcacgagatcctcaataatccggtagccgtcaagcggaggaagcggcagcaggttgaataaacacagcgcgagattcagctgaatccaaatagagaaaaagcggtcaagccccatgctgaatgcagaaagcagctccattccgtaagcatgcatcaacactagcaaaaagaaaccgataaaggcaagaagcaggttgcttacgggcccggcgacggaaactagcactcccgccagccgcggtcttttaaaggcgcggcggttcaccggcaccggacgggcccagccgaaacccgcgaccaaaattagaatcgttccgaaaacatcaagatgtttaatcggattgagcgttaatctgccctgtctcgccgcggtatcgtctccgaaccgatacgcgacatacgcgtgcgccagttcatgcatcgtaaatgccacgatcagcgtaatcacgacatagggcataagctccagcggataatataaaaatctgtccaaatgtcaaaatcccctttttttaaaaatgcaagattgtccttcattcagtatactataagtgatctctcttccaaagagaggaaacgataaaggaggatcagcaccatgccgctcgtaaccgttaaaatgcttgaaggccgcacagatgaacaaaaacggaatctggttgaaaaagtgaccgaagccgtaaaagaaacgactggcgcagccgaagaaaagatcattgtcatgattgaagaaatgagaaaggatcattacgccgtcgccggcaaacggatcagcgatacggagtaatccttgataatggccggcgctgctatgtcaggccggcttatttcacaaccttttcaaccaggctgaaaaagattttcttttcttcctctgtcaatgcttcgaacagttcgtcaatgagcagctgccggttttcaatcatttgcatggccgccatttttcccgattcggaaagcgtcatccataccgtgcggcggtcttcattgtttctcgacctttccacgaatccttctttttctaaatgattgagagcggttgtcgtggcggaaggcgataatgtgacctcctgcaatatatctttaatcgtgcacgtgccgtgccggtaaataatcctcagaataaatcctctgatattgtttatactctttggaattgtcgcctcatcaagctttttcgtgctctttaaatatttcgtgagcgcgtaatccagtacatttgcttgcaagttatcgtgcttcatgcagaaactccccatttcaagatgcatccatcatcatttgtttgttttttattacattttactgataccttacggagaaagtcaaaattccggccggaatgcccgcaacttttatcctgccctgcacagacttttgtctccctcttttttaccatatccttttatgcaatgctggttttatagacacgattcaggtaaaatcattaagggtgactgcgtttgacggtaaggataatctgatcggatgcggcagacaatatgattggaaaagaaaagaaacggaacagacggggaaacagaacacaggattgtcgattacacagaagatgtgacacgggtaaaagccaaagagtccctcttggcttttgcttttggatggagggatgcgtgttgcggaatatcctacaaaaaaaagacatcacccagctgcttgaacaaagcagaaaaaggcagactgccaaaacgatgggtggatttgatttaacattactgggcatcggcgccgtcatcgggacgggcgtcatggttcttacaggcattacagccgcgaaaaacgccgggccttccgtaatcttttcttttatcattgcagccgttgtctgcagccttgcagcattatgttacgccgaaatcgcttctgttctcccggtttacggaagcgcctatatttactcttataccaccatgggagaaattgtcggccatttaatgggctggacgctcttatccgtttatatggtgacggcgtcagcggtggcaagcggctggtcaagttattttaataatctgttagccgaaatcggcatgcctttgccggacagtctgctgcacgtgccgagccaggggggatcgtcaaccttcctgccatcatcattactctattaattgccgtcgttctgtcacgcggctctaaagagagcaaaacctttaataatataatggttctcgtaaaaatcggaattgttttgctgtttatcatcacaggaagcttttttgtaaagccgggcaattggcatccttttatgccttttggaattaaaggcgtcattacgggggcttctgccgtcttttttgcgtttctcgggtttgacgcgatttcggcttcggctgaagaagtcaaaaaaccgcagcgcaacctgccgatcggtattatcggttcactggtgatctgtacattggtatacgtcatcgtctgtctcgtcatgacgggtatggttccgtattcacagcttaatgtgccggaagccatgtcttatgtgctgcagactgtcggacaaaacgcggtggcgggcattatcgctgccggtgcggtgatcggactgatggccgtcgttcttgctcatacctatgcggcgacccgtatatcttttgcgatggcaagagacggaatgctgccgaaagtctttaccattgtcggaaagaaatcgggagcgccgatctttaatacgtggctgatcggactgatcagcgcatgcatcgcgggttttgttgatctgaaagagctgtcggatctctcaaacatcggcgcgctattgacatttgccatggtcagtctgtccgtactgattctgcgccgcacccataaggatctgccacggggatttaaagtgccttttgtacccgtactgccgattttggccattatctgctgtttgtttttaatggtcaatctgccgctgaaaacgtggctttattttgccgtctggctgatcatcggcgtcatcgtttactttttatattcgtacaagcacagcaaattgagacaataaacaaaaccaggcccgcttcatcgcggcctggttttttcataaaaaaagacgaaagcatcgcctttaacaaatgtgtttcagctcttctatgtagtgaagcgcctcatcatattcttcatccgtatatttctgtttgctttttatcgtaaacactttctctttcttttcctcagcttcaaggccgtcaaaatacaaaatcgtagacaccagctccagaaaccgggatgagcggctgttgacgctgtcgatgtacttcttcatatccggcatcttaagctccgcatgatgtaaaaactcggctcccgtctccgtcagcgagtaccggtattgaaagtagccgccctttttttccttcacctcatccagaaacccaagattgcacagctcttcaattcgaagcgtcagttcttcggaatacgggccgtaaaaatgaaaatcatatttttcgtagaaaggatactgcattttcttcgcgatataaatgattttctgcagctttttccgcccgatgatttctccagaatccgagaacaccttcatcagttttgcatgttctttcaacaaattcccgacatctccttttccttctttaccaaaatccttctatgtcagtcccagcagctgccggatttttaattttgcttcagggttttctgaatcgtcgcaaatgaggtccatcggatagtagagcttatggtccgtccggcgtttgcccgaaatggattcgacaatggcggactgcctggacagctctttgatctggccgttctgcgttaacagatgaatcggcagacgctcctcctcttcacccggccggtaaaaatcatacggcagatccgatgaagaatcgaccactaaatagtaattgggatcaattcccgcctctttaaagagagcggtcagttcaaaataagccgacatttcctcattcggattaaattcggcatattgaaacagctggcggttaatgaagcggcggcacaagtcggacagaatcgggtcctcttcttcctcccaagcctggaaataatataaaatgatggcttcatcaagcttcagataatccgcaagcgtcagcttcccttcaaaaatggaataaaaatgaacgggagcatgagtgaatatatacccttcttcatggagctgcttcgcacggtggagaattttcgtcaaaatgacttcagcgcttctcgtcacgggatgaaaatacacctgccagtacatttgatagcggctcataatatagtcttcgacggcgtgcatgccgctttgcttaatgacgatctggtcctctcgcggacgcatgacccttaaaatccgttccatatcaaaatgtccgtagctgacgcccgtatagtatgcgtcccgctgaaggtaatccatcctgtcggcgtcaatctggctcgaaatcaggctgaccacctgtttgtttttgtatgttttggcaatgacttcggcaacatcctgcggaaatcccggtcccgcctttctgagaacctgattcacctcggtgtcgccgagaatgatttccctcgtatagtcttcatgatccagatgaaaaaccttttcaaaggaatgcgaaaacggcccatgtcccaaatcgtgcaaaagcgcggcgctgagacagagttcgcgttcattgtcatcccattcaggacgccctttaaaaacatcatcaaccattcgtctgacaatctcatagacgccgagagaatggttaaaacggctgtgttccgcgccgtgaaacgtcaaatacgtcgtaccgagctgtttgatccggcgcagccgctgaaattcacgggtgccgatcaaatcccagatcagcttgtcccgcacatgaacatagcggtgaacgggatctttaaacactttttcttctgataattttccgtttggatacgccatcgtcattccctcttttttttagccgtgattctattatatcggctctgtaatttgaaaacatccttgaatttgtccggcgttttgttccagttttcaatcattgattttttgaagcaaaaaagcctgacccatcgggcgaggctgtcgtaaaaatgcacatttactttttgatcttctttttcactttctcaatcagctcgtcctcagtcggcgccgacagcgggcggttgtttacgaaagcaaacgatttcttgcgtccgggcccgcaatatgactgacatccgacctccacttttgcatccgggtcagcttctttcaaacgcggcagcaatgtcttaatattggtggcctggcaatcatcacacactcggaattcattagccatgatgtacgcttcccttcattcaatgttcctctatgttaaatcttaaattttaaaaacgaaaaaaatcacatcacgttttattgtacaaggattcatcttatcctgcaaggctctgcgtatctctcattctttcagccaatttgtataaatattttccaatctggacattctaataccatcaaagattattgggggttgagaacattgacaaagcaaagacaggacgcctggtcggaggaaaatgacctgctgcttgcggaaaccgtgctccggcacgtccgggaaggaagcacgcagctgaacgcctttgaagaggtaggcgataaattaaacagaacgtcggcagcgtgcggattcagatggaatgccgtcgtgcgccatcaatatgaaaaagcgcttcagcttgcaaaaaaacagcggaaacagcggatgcgcgcgctcggaaacggccagccggccaagaagaaactattataccagccgcctgcaccggatgcggacatcattcaagaaaccgcagccgaagagacggttcaaacggaagcgccaaaagaggatcggcaagccgtcatgtccggcgaacatatgccttatgtcgatgaaagcttcaaggaagagttagctagtttatcacatttgctggcgcctcagcagccgagccaaaaggcggagctcacaatggcagacgtcattcaatttctgcagagctatgaaggcagcggaaagcaaacttccgccctgcagatggaaaatgaccgtttaaaacgggaaaaccaagaacttcagtctaaaaccgagcagctggaagcggccgtcgaaaaacttgaaaaagatcaaaaaaccattcaggaagactacgaaaccttggtgaaaattatgaacagagccagaaaactagttttatttgaagacgacgagcatgcgtctccgtcctttaaaatggaccggaacggcaatttagaaaaaatggccgaataacgcaaaaaaccccttttcttgtcatggaaaaaggggtttttgccatttgtcaatgacgcgcatcctgatctatattaatgtaaacattgttcaggaggccttcttcccgcaagggctgcgcatctcggtccccgcccgcacataagcataaagattcaattcctcatcccaaatggttcttgggaattattgatcgattagctactgtgcaatacactgtatagagaatacaattattagatatgatgggaatgatagtaaatgagtagccaattacgaaaaggagcattggaactttgtgtgttgtccctgcttctttatgaagatttatatggttatgaattaatcaaggtcataagtgaaacgttccctgtatcggagggcaccatctaccccatattacgaagacttacgaaaaataactatttaaaaacgtatacagcagcttcagatcaaggcccgtcacgcaaatattacaaagtaacagaagaaggcgccttttatcatcacacattaaaatcggaatggcttgacctgtccgaaaaagtgaacagcatcattaaggagggaaaatgaatgtgtaaagaccaatatttaaaacatctccggcgggaaataaaagatctgccggaatttgagcaaaaagagatactcgccgatatcggcgaaatattccaaatgggcgtcgctgaaggaaaaagcgatgaacaaatcgccggcaatttaggaaaccccaaaacacttgcgcgcgccttaaaagcggatattttcatcagtgatgccgaggagcagaaaacatggcgctcctttttcaaagcattcggcctgatgctgggtatgggcatgttcaacttcatgtttatgctgacaccgtttctttttgcctctgttgcggtgttaagtttgatggcaatcggcctgatgctgatgaccggatcattctttctcctcataaaagtgccgattgtaacagccatttttaacggatgtatggtcctcggagcgggtatggcggtgtttatggccggatttgatctttcgaaactgatattccgcatctttttgcgctatttcaaatggaatgtcagcattgtaaggagggaaaccattgaatcgaaaaatgtggtatagcattgctctcattttaatcgctgccggcctgatcggaagcatgttcttcggttttgacggcttttaccctaaatcataaggaaggtgtgcaagtagcatgagtgaaccagccctgatattaaaagatgtctctaaaaccatcaatcatacccctattgtacagtcaatttctttcgatgtgagaaaaggcgagatattcggccttttagggccgaacggctcaggtaaaaccactattttcagaatgatcgtacagcttattaaaaaaacagaaggagccatttcattcagaggcagaccggacagcgactttgaatattttatgagacatatcggggttatcattgaaggcccggatatgtatccgaatatgaccgctttgcaaaacctaaaatattttactaaactgcgcagcacctcgctgcgaacggatgaccttatgaatacccttgcaaaagtcggactggagcaggctgcccgcaaaaaagtgaaacatttctcattaggcatgaaacagcgcttggggctcgcttattctcttcttcacaatcccgggttattaattctggatgaaccgatgaacggtctcgatcctaaaggtatgaaagaattgcgcatcattctttccgatttagcgaagcaaggggtttccattttattatcaagccatttattgtcagaaatggaggagatttgcgacagggttgcctacattaaaaagggacggattttaggaattgaagacatgaagagcagaaatgaccttggtcagaaaaagctgtttaccgtcacggtcgatcatccggcaagggcgaaagaaatattagagcaggacggtattcttcaagtacagcaaaaagacagccgcatcattgaattggaagcggaggaagataccatcccgtatatcattaaaactttggcagagaaagagattctgatttcccgcgtttctgcaaggactttgtcattggaagagaaatacatgatgattacagatcaggaggacgcggtatgagcatatttcatctgacgcagaacgaattcataaaaataacccgaaaaaaaggcacacttttatctctttttttcctgtttctcatcgttttgctggccggccttattatgaatcatgagttagatgcttcctcggataacaattggaaagaacggcttctcgccgaaaaaaaacaggaagaaattaataaaccggctgaaacggcaggcgtttattattctgctgatgttaagaataaagactattatttggagcataacatcaacccttatgaatggaacggctggaggtttttcggcacggttacttcaaacgggcttgagattttcgtaagcttgactgcgattttaaccgtcagcggggttgtttctaaagagtttgcccttgggacgattaagtttatcgctacaagcccgaaccgaagatggcggattttaacatcgaaatttctggcctctcttctgtttaccggcatggtttacttattttactgtgtgagctgtttgctgatcggcggcgtgttattcggtttttccaatgcttcatatccgctcgtctatactcatttaaatgacagtctgtataccatcagttcaatcaaagcatccggaatcattctgcttttgcgtttcatatcaattataagtattgtcaccattgcgttcactttgtcagtattgtgcaaaagccaggcgctctccctttgcttatccattttactgctgtttgccggcagtatattgggcggaactgatttgcttgcccaatttacatggtataaatttacactctttccgcatttaaacctcgttgcttatgtaaataaaagtgcgggtgatgcgatttcaacgttaaacatcccctattccgtgacggttatagcgatctactttcttatttgtttattgatttctttttccgtctttcaaaagagagacattacagcatagacagagaggcggcggcataatgagcggacggcaggaaatattgacggtccagcaatttgccgctgaccgccccttggtccatcgctaatggatttaaataaccgaagcttccgctgcttcgctgctgaaagcgtagaaattcccgcccttcccgtataaaaagcgcctcatcgaatcggagaaatttcataatggctgtgtattttgcaacggcgtcaatgtgatactttctgcactcggctaacattaaacctgaaaaagcaaagtctgatgttttgtaccattccgtgagaaaaggctgcaattttttcatttgcaaataagagacggcataaagggcatctgcctgctcttcctggatgctgcccggtgccatgagcaaatcggcctcacgtttcattgcggtttctaagaaaacgatcagttcttccggggtcaccgccccaaaataagctgctaacaccatgaggatcatagaggaaggctctgatttcagttcctcttgtaaaccgcggaccatttgttcaagtccgttatgaaaaaagatgctttttgcggcattcatcctgcggtatatatgatacgcatacgcgaacaggaccggatggcattcgtgcgttttttctccaaaataacggtctaagaatagaatgacttcttctgtatcctttcttttttcaaagtgatgacatgccgctaaaccgcaaaacaggtgcatgagatcatctgcttccatttcttccggctgcagctgaatgttcttccaaaaacccagcagccattcttctgttttttttatattaaaatgttccttgactatccgcatgttccacactccagattcagaatctcaatcgccggcagaagagccggagcacaatgaatggatggattctcgttatttatatgatgaagagccgcttgacagccataaaaaaatggatcgatacacgattggataaataacatattgcacagctgtttcatttttcggctgccgagacaaaacacaagccatttttgaatggacgccttcaagccgggatgaagcagatgctctccctgatctaaatgaagaagacagtactcgacaaactccagctcgttttcagctgttcttttccatgcgtcatggagcaaaggctgaaatatcgaattcttgtaaaagcgcactttttcatggtcagttgacattcccagctcgttcagcaaaccggcgaattcggcgtatttaaaataaggccattctttttttataagatagccgttttgcaatccgtgacgtatgacttgatcatccgaatccattccctgcttctttttataagcttttgccgttaaatagatatgaatcaactcattgacaatggccgtgttacagtgaaacagatcttcccagcatgacttatcaacgaaagcggaggcaatcctttcagtatgttcttttacagcggaagaatggctcgtctttctgtagtatttgcagaagccggcaaacagctgaatgctcttttgatccggaagcgattgttcagcaaaagataataaaaattgatccgtctcttcagctaatctgttcaagttaatcgttcctttctgctctaaggcaggcatgcgcggcacccgcggcgacaagtgttgtatgatagcaatgtttaaacacatcttctcttcgctgttcacctttcaaaccgggtttatgttgataggtgatgctcgggacattcccctctttcatttggccccgatagattttattccaggctgcttcatagagcggtttatggttgtccttatccatgtcgatatgtaaaaaagagctgcacatcaataattcactggtaatatctaaattctcaagacagatatagatcccgagaaatttcaggaccttttcttttaaggacgacagatgatactctttatccgtaagagaagaacatcccatgtctgttatataaaaaatcgtatgagtgatactgtatgcatcatgatccgtcatatatgtatttgggatatcctgaccagctgctgtgtagtgatataagtcagaaaaatccgttatttccgaggttacgcctgctctttgcagactgtacttcagatccatttttcgaaagggaattttagcaaggctgcaatcaaaacgcgctgccgtgaatttttccagctcccatatcactgaagcttgtgacggatgatcagtcaaggtaagaaattcacccgcaatagccaatccggcgagaccgtccggatcaaaatgaataaattcttcaagctgatcattacggagcctttctgtaataaactccgttaaaacagcaacttccttatcatctgcctgatttctgatcaggtaattggtaagaaaaatgagttctataaatgttttaaggcgccatctgaaatcattcgctactttatgtttcatatcaaaataatggatattttcaacaatccatgacagtgctccccgcttaatttctcttatatactcttgtgtcacactctcaccgcctcgtctcgaatgcgtaggctccaaacagtcattatcttacttttgagcggctaaatcagagaaattcaaattcgggttttgattgtcttcttggctcggcactacaagcacccagccgctccaagcgaaagaattgcctgattgttccgcatctccggctaacaaatgtgtagggatcgtgattcttttttcttcttttatttttttaaagttcatatctccatctccttcagtttatagaattatttggaacctacataaatatattaatcaaataaggtatataatgtaaactagttttgatataacgattctttttcactataactgaatagtatataattaccaaaaataaaaaagcccggactcagtccaagctttcctgcgtgccgaacaccttctcattccgttccagcattcggatcagatttttttcaaataccatttcctcttccggcgataatccggctgcatacaggcgtccgctgagttccttcagttcagtcaaaagcgccagcattaagtcctgcacggtaatgtccgtttgcagcaattcgcttaatgaagccatcgtttcgggccggatatcgggatatacgccttttgtatcgttgcttttgtcttttaaagcggcttgatagaaacgtctgatcagatcggcgcgttcgcttccgcttttatcggcacagaggtaaatctgaaccgcggttccgccccgcaggcgtctttgtgagattcccgcgaattttcggccgccgatgctgagatcatagctgcccggacagtacgatcctttaatttcatatgcttcaatttcggcattgtacggacacagcatccgccgcaccagctctgtcatcgcctcgtagcctctgtcaatgtcgatgccttttttctcatcttcaaaaataagagaaatattcaatacgccttcatcgagaacgaccgcgaggcccccggaattgcggacaatgacacggtagccttcgccctccagcaatttcacgccgtcctctaaaaacggcaggcgtgtgtcctgaatgccgagcacgatcgtccggtggtgcacccaagtgcgtgccgtcgcaggcgattcccctttgcctacggaggcgcacagcgtatcatccattgcgaatgactgcttcgcatcaaaataagggccaaggctggattggtcaatgattctccagctcggctgcatcagtaaatcaatcggttgctttcccatctatattaaatccctttcgtcataagctttccatgcgtttattatatcactccgcttgagatgattgaaattggcttttcaaaagagcgatgaagatttctttgttttttgtgttctccataatggaagattggatgatagacagtttccgttttaaggagaatccttttatctcaagcacggaaatgctgccgtgaagcagatccttttgcagcacgctttttgacagaacggaaagacccattccgctgatcacggcttccttgacaccctggttgctgctgatcgtcatcatggatttcggccgcagtccgtttgattgaaggacgtggtctaaatattccctcgttcccgaacccttctcccttgtcacccacgcttgattttgcaattcggcagccgggatgttttttctgccggcgagcgggtgtccgttcggtgcggcaatgcacaattcatcctccataaacggctgaatgtcgagctcgtttttccccgtatgcccttcaattaatccgatatcggcttgaagcatccgaaccgcttcgctgacctcctccgtgtttccgatcatgacgtccaggttcagctcgggatactcgtcatgaagctttgcgagaagcggcggcagaatatattcgccgatggtaaagctcgcggcgattttgagcttccctttgacataatgatggtgggcgtaaatttcagatttcgcctgttcgtacaaaaagaccatctgcttggcgcgctgatagagaatgtccccgtcggcgtcgtcgtaaagtgcttcggagagcggttcagcaaagcggtttgaaattctttctccaggtttttaatgtgaaggctgacgcttggctgagaaatcatcagcttctgcgccgcctttgtaaagtttttttcttccacgacggcaatgaatgttttcagttccccgtaatacaaaaagcatcgcccctaatcattatttttcctaatcgtttagatcatataaatatattttactaatgattaagaccgcagtaaagtggagttatcaagataatgggaagtgactgagatgaagatgataaagggtatttcagttaccgcaggaattgcgtttgcggctttctatgtcagccgcctgccgtttttgcatatgctcggaatgcttgtccttgccatgctgatcggcatgctctggcgcgccgtattcggacagcgggcggcattagagccggggatcgcgttctcaagcaaatacttgctgaaagcaggcatcatcctgcttggcatgagactgaatctggcggatatctatcatgcgggctggcacgtatttgcaattgccgtctgctgtatgatgtttgcgggtgccgttgtatacggactgtcccggctgttccgtatagatcagacactcagcacgctgacagcctgcggcacagcgatctgcggggcggctgccattgccgcgatcgcgccgcagatcagatcaaatgaaaatgcagccgccatcagcgcggccgccgtttcgttattaggaaccgtttttactgttgtatattctcttgcttatcatggattggggttttctcctgcggcttacggggccttttgcggggcaacgcttcacgaagtggcgcatgcggcggcggccggcagcgccggaggaaaagcagccgtcgagatggcggtgatcgtcaaactgacccgggtcgcgctgctcgtcccggccgcattcatgctcggaatgcgggcgcgccgcagcggaaagtcaaagacggcttctgccgcttcgctccccatcccttggtttatcttcggatttctcggaatgagcgccatccatacatcaggcgttatttcagcttcgttttccgcgtttcttgttcaagtgtcttatgttttaatcggcatggcgatggcgggtctcggtttgaaagtccatatatcggcgtttcgtcatagcggctggcgggcgctcgcagcaggcttgatcggttctctctgtttgtccctgttcggctgggccgcagtgacattctttctataaaaaaagccggtcctcgtaaagaccggcttttgcggattacagcgcttgagcagccgtaattaacgcaagattgtagacgtcttccgcattacatcctctggaaagatcgtttacaggcatattcaatccttgcagaatcggtccgaccgcttcaaagccgcctaagcgctgagcgattttgtagccgatgtttcctgcttcaaggcttgggaatacaaatacattcgcgtctcctttaatgtcggagtccggcgcttttttctccgcgacagacggcacaaatgcagcgtcgaattggaattcgccgtcaagcgtaagctcaggcgctttttccttcgcaattttcacggcttcagccactttgtccgtctcgtctgatttcgccgatccttttgtagagaagctgagcatggcaacgcgcgggtcaatgtcaaacatttgagccgtattggcgctttcaatggcgatttcggcaaggtcctggctgtcaggagcaatgttgatcgcgcaatcagcgaacacatactgctcgtcaccgcgggccatgatgaagacgcctgatgtttttttcacgccttcttttgttttgatgatttgcagtgcagggcgcaccgtatcggctgtagaatgtgcggctccgctgacaagtccgtccgcgagacctttgtacacaagcatcgtgccgaaatagttttcgtccagcaaagctttgcgggcctgttcttccgtcgctttgcctttgcggcgttctacgaaagcctgaacgagttcttccatgccttcatatgtatgcgggtcaaaaatgtccacgccgtcaagcgtaagatttaattctttcgcttttgcttgaatgtcttctttattgccgactacgatcggctttaataccttgttgcccgccaagttgttgaccgcaaccaggatacgttcgtccaacccttcaggaaatacgattttcacatcttttcctgcgactttttcttgtacttttgtaaataaatctgccacgatattccctcctctatgttgacaaaaaacgcttacttttacagcatactcttcttccagctaaattcaaataaccaacttctattatagcgctttcaaaaagaaatcttatttttctaactaatttaattgacggtttgtttcacggcttagtttctgacacaaggcttcggattattcaaggtttctccacagccgaaacggttaaactgtgatatagtgaaggcatcaatgtaatgaaaagatataggagtgaagatacatgagtgagcagcaaaaaacgaacgaagccgcccaaacacttgacggctggtacgcgcttcacgatttccgcacaatggactggacgtcatggaagatgttatccagcgatgagcgcctgtcgattattcacgaatttacgggactgcttgaaaaatggggcgtcgcccaaaaagaaggcaaaggctcgcaaaccatctacagcatcgtcggacagaaagctgatttcatgctgatgattcttcgcccgacaatggaagagctgaacgaaatcgagcttgaatttaacaaatcaaagcttgctgaatttacgatcccggcttactcttacgtgtccgtggttgagctgagcaactacctcgcaagcggagaaggcgatccgtatgaaaacccgcatgtccgcgcacgcctgtatcctgagctgccggaagcgaaatacgtctgcttctatccgatggataaaagaagaagcggcaacgacaactggtacatgctttctatggatgaacgcagaaacctgatgagaagccacggcttgatcggacggagctatgccggcaaagtcaaacagattatcacggggtctgtcggttttgacgattacgaatggggcgtcacgctcttcagcgatgatgtgcttcagttcaaaaaacttgtttatgaaatgcgctttgatgaagtcagcgcgcgctacggagaattcggttcattttttgtcggaaaccgcttgtctcttgacacgcttccgaagtttttgcacgtgtaacacccacccgcctgtccggcgggttttttctttgtcagaatttaaataaaatttgctatttttatcatttttttttacgatgtaaaggagattccattttggtaaaggggtgcagacagttgtcaaaacgaaccgcatttattatgggagccagccaggggatcggcaaagcgatcgctctgaaactggcggacaatggctttcataccgtcattaattcacgagttcccgaaaatatcgaatcggtaaaagaagagatcctcgccaaacatccggatgcgggcgtcaccgttctggccggcgatatgtcggaccagaaggcgagagccggcatttttgaagagatcagatcacaatgcggacggcttgatgtattgatcaacaacattccgggcggctcgccggatacctttgaaagctgcgatatagaggatatgacaaatacctttacgaataaaacgatcgcctatatcgactctatgaaaacggccgcagcgatcatgaaacagcacgaattcggcagaatcattaatatcgtcggaaacctatggaaagaacccggcgccaatatgtttaccaacagcatgatgaacgccgctttaattaatgccagcaaaaacatcgccattcagcttgcgccttttcacattactgtcaactgtctgaatcccggatttatcgccacagaccgttatcaccaattcgtaaagaatgtcatgaagcaaaacggcatttctaaagcggaagcggaggaacggattgcctcaggcgtcccgatgaagcgtgtcggaactgcggaagaaaccgcggcgctggctgcctttcttgcctctgaagaagcctcctatattaccggacagcaagtgtcagccgacggcggcagcatgaaaagcatataataaaaacatcccgctctcagcgggatgtttcttgtaatgaaggaaaggacaaacctagcttttgaatccgcagcacgaattcccttaaatcgccctgttttgccaccattgatattctgacataacgctttccgccgctgccgaaaatctcgccgggcgtcacgacaacatgggcatgctccagcagatagtccgaaaactggtgtgaagactcgaattcattcggaatttcagcccagacataaaaagtccctttcggtttttcaatgctccagcctaattccttttcacataacgccgtgaaaaaatcaatccgttctttatatgtgcgcttcagacgctccgtatgctcaggatttcctgacagcgccgccgctgccgcctgctgaaggccgccgaacatgccgacgaagacgtgatcctgaaactcattgaccgcctgaatgattttctcattccccacggcaaatgccattctccagcctgccatattgaaggttttcgaaaatgaataaagctccgcgccgaccgttttcgcttctttcgcctgaagaaagctggccgggttctgatcaaattcgaacgcgccgtatgcaaaatcgtgaataagatggatgtcatatttttttgcaaacgcagccgctttttcataaaacgcctgatccgcagtcgcgcccgtcgggttattcgggtaattcaaaaacatcagcttggcttttttcaggacggcgggatcaatccgctcaaaatccggcagatagccgttttccggatgaagcggcatctcatgcagctccgctctggccattgtgattcccgataaatactcagggtagccggggttcgggactaaggcgatatcgccggggttcagcaggcattgcgtcaaaacgtacaaacctgctttccctccgccgaacagcgcgacttctgtctccggattgaccgataccccgtactctctctcataaaattccgcgatggcttctttcagaaacggatagcctctgaaagggccgtatccgtgatatgaaggattcagcgcagcttcccgcaatgcttcaacgatatgcggcggagtggggagatcgggattcccctggccgagattaataatctgggctcccgttttctccatctcttttaccttttgaaaaacgagcgaaaattcctgtttcggaagtgtcttgatgacatcggacggtatgatttccatctggaaggctccttataaatggatttgctctgattcgttattccgttctgaaaaggatttattgaccagttttgtatgcagaaacagcccgctgaccaaaaggacgataaacgccatgatgactgccgcgtctacaatgttgatcagcatggaaccggcggcgatgcacaatccgatggacgcctccgccaccgaaaagatccggccctgaatctggttcgcagcgttctcctgaactttgacctttgccagcacttcaccgtattccattgcgataaagaaaagaatggcggcaatgactgacacggcgaaaatcggggtaaacaaaaacagcgcaagcgagacgatcgataacactgtaaaatacatcagccctttattgttgttaaagccccatttgctgacaagagcggcgccgataaagccgccgaagccgatacagaacgtcaggatgaaattgccgatttccccgtcgcctaaaaagcggctgacaatcgggaaatagctgtagacgacaccccacaaaagcgccatcgtaatcatcgtgaacatggcgtttaacacaaaagcatttgttttgatttccttcaggccttctttaaacgactgaaaagcttctcttacgttttctgactgaatcggcacgtattgaagcttaatgcggctgatgaaaaacgcggagacaagataggtcaccccgttaaacgcgacggcaagctccacagaaccgcctaacagaaaaagtccgccggctgcagcgccgacaataatcgaaatcgtcgtggcttttgcaaacaaagtgttgatatttttaatatccgcttctaaagacgacatgaccgcgagacgtgccgggttaaaaaacacgccgcttccgtacgagacaaacagcagcgccagaaaaagcagcggatattcgcctttcgggagaaatgtcagccccaaaaagatgacacctctgatcacatccgtccacagcatgattttcaccctgtcgagcctgtccacgagcacgcctaaaaacggctgaaacaccatcggaatgctgcggaccgcgataacgccggacgtcacccagtagtcatgatagtatgtagacaaaatgagcagggccgggagaacgcaatagtctcccataaacgaaagcgcctgcccgaaaagcaaatacttcgagttcggtttcagctgtttcataccggtaacgcatactttgcagtcagcttcgcctgctgctgaatttgtttgattgattcggccacgtcacccgaattgcttcctttcagctcaaacgccgcaatgctgttgaacgcttcgaacagccgcagatccacggatgtacccgcctcggcagccgagaaagaaacgagttcggtgtctccctttaagacgccgtcgggaatgtcaatgctttcaatgacgaaatcgacagctgtctcaggcagctggccgttctctttgaaatgctgaggatacaagtggcagtcggcgacataacatggctcctgctccaataatcctttcggcagatcggcttcttttccgaaacagagaacatccaataacagctgcgccatgtcgacgccgaagacctttttaatattcggaatcatgttccagcccgcaaatcgcgccgctgattcaatcagtccggcttcccggtttttcattaatttaatttctgtatgtgtcgcgcagttttcgaggccgagtccttcattcgcctttttggcagcttcgacaattttccgctttgcgtcatcatccaggatggacggcgtaatatgcgatgtctccgtgaatccgatttgcggtgttttatcatgaatcgccacagggaagtattccccgtcggccatgatgccttctatgctgatatagtcggaataaccgcttgtttcgtaccagtcgtcatactcgccctgcaaaaattcttccgcgataaaaggcgcttcaaacgtgaccgctttcggtacgttaatcgacttcaggtattcattgactttgttaaattctgcttctgccgtttccctctctttgatgagcgtcacgccgatggagctcgccagatatgtaggcttcagaataagcggcgttccgatttcctgaagcgcggcgcggaaatcttccagcgtcgtcacccgtttatttttgatagacttgacgccggcccggttgaaggcggctctcattttgtttttatctctggcattttcagcggcctgtacgcccgctccccgcaggccgagacgttcacacgcttttgccatcggagcgataaacagttcattgttggtcgtaatggcgtcaaccgcgaacatgtcagccaccttgacgatttcttcgacgacttcttcctcaggtttgtcatgatcttcatgagcccagtaaatcgaatcgggatgctcaaaatcagccagactcttaaaatagtctttatctttaatgaccgcaatcgagtatttttcaattaatgccgcatgagaggctgtaattgcaaaaggtctcggaataaagctgacgaggttgtatttttcggctgcgcttttgtaaaacatatgcggcgggcatcccccaaggtcagcgataaccaatactgtttttctctccatatgtaaacactccttctctattgtgcggtgtatccaccgtctgcggtgatcgcgcttccggtcatatagcttgataaatccgaagcgagaaacagcatgacgttcgctatttcttcaggcttgccgagtctcagcagcggattgactttcgctttttcttttttgatttcttcaagcgtgccttcgttgttttcaaggaacgacttttcattcaaaggtgtgtcaatgattcccgggcacacgcaattgacgcggatgttgtgtttggcgtaatcgacggccatcgaacgcgtcagctgcagtacgccgcctttagaggcgttatatgcgggaatgtcgggccatgcgacgactcctccgacggagcacgtgttaatgatattgcccttgccgcttttgagcatatacttgagcgcgtgcttgctcataagaaacatgcccgtcagattgacgttgagcactttgtcccaatcgctcagctccatctcatgaatcggggcgacaatttcgatgccggcgttattgattaacacatccaatccgccgaacttgtcaaccgctgaccggatggcgttttgacatgccggttcatctgtaatatccgtctgcacaaaatgcagcctgtcattgttttctttccggatcatcgcttctccctgcgcctcatcaatatccgcgacgaccacattcgcctcttgattcagaaacgcctgaaccgcggcataaccgatgcctgatgcgccccctgtgatgaggaccgttttatccgtcaggttcatgactctttcgcctctaattttttcgcttttgctctgttatagcgcggagggaaaaagatattgactgattttgaatctttttcaaatctgttgatggcgccgtgatcttctctcggatcgcagaaataagctgtaccgaatgtcatatccactttgcagccttcaatggtcatatcatagccaccgccgatgcagatgccgatctgttcattgcggtgtttatggaacggcatttctcctccgttgcccggaatgttggcaagcatgatttccacccagtcttccacgaagaacgtgacttccatcccaggcaataagtctctcgttttaaaaatattcaaaaaataatcctcagggcttgtataggtttcaccggctttcaggcgtttaatatcaatggcgatcacttctagatccgtctcatttcttgcgccgtgaggcacgttaggaggcgcgatataggctgattccagcgctgtcatctttcttgtgacatctccgacagtcatggacagctcgccggaaacgacaaggccgatttggacttccttatgctgatgcggttccacgtttgtatgcggcggaacgtaagaaagcagaacttccgtatcgcctctgacggacgaatattgtcttactccgttatcccattctattaatttaggcgtcgggaaataaagttcctgcaaatcttgttcagttttcatcatgaatctctccttttccgaataatgaccagctcatgggaatgcttttaaatgttttgacaaagtgaaggccgtacttttgtctggccagctcatttgtcagcgcgatgtcggacaaaccgtccttcactcttttcgcggctgcgctcgttgagttcaccagatcaaacgtgacatctttacgggtaaaatacttaatcaaattgataggagacgggtgggatacgatgacagtcttatcaagcatgtcatccgtatattcaaaaccgggccggacagccaggccgtacatcggggtgtcgcacctgaaaatttgcagaagctgcagatccggtctcatgtagaagtgcttaatgccgtcatacgcgtgaggcacaattgtgtattccagcggactttgaagcgttttttcaatgcacgattcaaatgtatcatgcaatgataatttgctgttcaccccttggagaagggtgaaattggtgatgaagttttttgctgcgtactcactgcttgtcccttcaggaccgagcgtgttgatcgtaatcagtttagatattgaataagccttgctttttgtttgaatgctattatccaatataatcatgagcaccaaccaatctgttaaattttaagtaaatattatccatagacgttcaagctgtcaatattatttgaaaatattgataattattcctatatattagaaaacaccttataatataaggtgttaaaaatttacatttacaaaattatagaaactttattttaccgatacaatgattggtcggtcttatgctcatattttccataccttctgtatgcgaaaacgctgaggacaaagccgatgagggtgacggccgcacagataaatccgacagctgcatatccatatccgacatagaccggacccatgacagcagaacccaaggtgacggccaaattggacgccagactgtaaaatgccatgattttgccccggcggctctgtgagcaatcacttaaaatagtgctgagcaaggtcaccgtcaggctttgcatcaatccccagacgaataacccgatgaccaaaaacggcattgatgacggcgcataggcgagacaggaaagccatatgctgatcacggccaatgccgcgatcaaagagcgcattttccccgccttatctgcgatttttccggtgaacacgctcatggaaaaaccgattccgtacaccatgatcagcagccctgaagctgtattcccacccggcagcacgcggtgaagatatgtgccgagaaaggaatacatgccgtaaaaaccgatcatgttgcaaaaagtgatcgtgagatatacagggacacggggcaccttcagcgcatcccggaaagtgcctgcctgccgtccgttttcctcttctgttttattcccatccgccgtgctgcggcgcgcctcaatgaaaatgagcgaagcaacgaggacagacatgagggcgaaaatccaaaacgtccaccgccaattcaaaacgccgccgataaaagagccgatcggaacgccgaaaatcaaagcgagcgaccagcttgacacgatcagacccatcaccttgccgcggtacgcataaggcacacggtcgccgaccaccgcatatgctgtcggcacaaacgcacccgccgcaagcccggaaagcgccctgcccagaaagaagaaaaagagattgtgcgccagcgcgcagatcaccgtgccggccgtaaatataagcagtcccgccagcagactgagttcccgggaatatttatctcccagcggaacgagaagcggcgccccgataaaaatcatcactccgtaaatactgatggaaagcgccagcacactgacatccgagctgaaagcccgcgctaaatccggaagcagcggagaaatcaccagctcttcagaacccgcggcaaatacgcctaatgtcaaagcaagcgcgagacagaccggaaatcggcgtttcgtttcgatgtgatcggtttgtttgctgttcatgctctttgaacacctcttccgtaaaacttttctatcttttgttgttttatagtttagcatccttatatttcattttacatttcacatgaaaactaattctgattttttatttacattcagatttttaaataaaatatttagtttatattcaataaatgatataaaatacgccgtctggttatgctatagtgatagaatcatttgttaaggtgggggtcatgaaatgaataacgctgattcaaaggccgcccgcgcaggcctcggcatggtactgattctcgggacgctcgcttcattcgggccgctttcgctcgatatgtatctgcccgctttgcctgaagtggcggccgatcttcatacgacagcgtcacttgcgcagctgagcctgacgttttgtcttttgggtctggctgtcgggcagatcgttgtcgggccgctcagtgatatgatcgggcgccggaagccgctgattctgtcattgctgctttatacgctgtcttctttattatgcgccttcagcccttctgtttcgtttttaattgtcatgaggtttattcaaggtttcaccggggcggccggaatcgtcatcgcacgggcttccgcacgcgatatgtattccggaaaagaattgacggcttttttctcattactgatgctcgtcaatggggcggcgccgattttagcgccgattacagggggatttatccttcagttcgccggctggaaaatcgtatttatcgtgctggcggtaatcggctgtatcatttctgccgccgtgcttacggtgttgcctgaatcactcccgccggaaaagcggacaagcggcggactccgggagacgctgatgacgtttcgcggcctgcttggcgaccggatgtttatgggatttgcgctcagccaggcatttgtgatgaccggcatgttcgcatatattgccgggtcgccgtttatactgcaaaacatctacggcgtatcggcccaaatgttcagcctgctgttcgccgtaaacggtgcgggaatcatatgcgccacccaaatcaccggacggatggccaaaacacatgatgaacggaagctgtttgtctccggtctgatgattgccgtcatcgggagcatcgctttgcttttatcacttgcgtttggtttaggcctggcggcagtctgcatttctttattcatcattgtttcttctgtcgggatcgtcacgacgacgggattttctttggctatgcagaaacaggagaaaggcgcgggaagcgctgcggctcttctcggactcctgccctttatcggcggtgcggctgccgctccccttgtcggtattgccggagaagaaaatgcctggccgatggccgtcagcattttcggttttcagttctgtgccgttctatcctatgttctgtcggccaaacgaaacacaaagtaaagcccgccgctttaagcgaagggctttttttcttatccggcagcgcctttttccgaagaagccggctcacgcttcaggcgttttttgataccgaagtgataatacgcgtaacagatgatcatcagcgggacaccgcagtacagaccgatacgctggtcggggataaagatgagactgattaagataagaccgtaaaccgaaaatccgagaatcggcacgatcggataaagaggcgttttaaatgccaggtccttcagatttcctccttcagcgagaaagcgtctccggaaaacgaattgtgaagcgcagattgacatccacgcgacgacggtaatcataccggagatggaaatgagccacacatacaccgtttcagccgcgactacacttgtcagcagggataaaccggagatggcgatggtgatgaaaagagctttcagaggcacgccttttttcgtcagtttcgttaaggaagcggggcccatcttagtttttgacagggaccacatcattctggacgaagcgtacagcccggaattcgccaccgacagcatggcggtcagaatgacaaagttcatgatatcagccgcataaggaacgccgattttatccagcacagccacaaacgggctttcgatgacgcctgccgtttgatacggcaaaatggacacgagaacaaacatcgccagcacgaagaaaaaaagcgtccgccatatgacgtttcggatcgagcggggaagcgtcttttccggattttcgctttctcccgaggcgattccgaccagttcggtaccctggaatgaaaaattcaccataacaagggtaaacagcacggcttgggcgccgttcggaaaaagccctttgtccgtcgtaaagtttgacagatacggagccgtctgcccgccgttaaaaccgacaaagccgaataccgcagcgcagccgagaataataaacaatacaatggccatgaccttaatgctggaaaaccaaaattccatttccgcaaaactccgcgcagacagcgcgttaatggaaaaaatgacgacgccaaataccaggcaccacacccaaatcggaacggccggaaaccatcgctgcattaaaatccccgccgacgtcagctcaagccccactgtattggcccagctgaatgcgtacatccatccgatcgtaaatcccgtcgacggcccgagaaactttgcggcatacgcctgaaatgatcctgcgaccggcatggcaaccgcgagctcccccaaacaaagcatcaccaggtacattaaaaatccgccgatcacataagccaatatcgcgccgatcggtcccgcttcactgatcgtaaaaccggagcccagaaaaagccccgtcccgatcacgccgccgagggcgatcataaacaaatgccggcccttcatcgtgcgctgcaattcattttgattggtatctccctgcatatacatccccttattccgttatgtcagccatttgtgcgtatgtctaatcggcagctgtgcaaaaggtgcattgtcgtctgctgaatgagttccggcagcacatggaatgtgtacggtttgtacacgcgttccgtccatttatggccgtcctttccgtatacccctatattgaccgacggaatattcaattccctgatttcattaaaaggaatcgtcccgatgacatcccagcccggaaaattatcggtaaaggcggagacctcctcatctgtttcatgcagcgataaaaagcttccgtccgccaaataagggaaaaactttttaaagacgaatgtttctccggttgatgccgctgttttatcgaccgcttcttgaatgacatgctgcaaaagccggtcccgtgtgctttcttccttcagataattgtgcggaaggtaaggcggcgcatagaaaataatgaccttggctccctgctcaggatcgagtttttgcagttcttcgacggctttaaaacatctcatccgcagttcaagatgttcatatgttttaaatgcctgcccgatacactgtgcagggtctatcccgcggcttctcagccttttcaggtaatcttccagactgtacacttgaacgttccatgacatctcttttttcggcaggctcgttctctcacagtattcgtcgtaataatcagataatttttgttctgtctctttgcaggcttcgtcagccacggcggtcagctgatccatgacttctttggcggttttctcgtaaataaaataattaaaatagacatagctgctgacggcggtctgcacgttatacgcttccttattgtcacgctggtagaggcaggtcggcggaagcacaagctccccttcaatgttttccgccatatgaatattgttgtgaattcttctggtgatttctgacgcgatcaaattcggatcgatgccggacagcgtatctccgacatgcacctcccgcccgtaaatcgcaaagcaaggcaaaagcttccctgccgcgcccgtgtatatgtaccttgtcgtgtcaccctcatacagcggcgtgataaaatcgttattaatcgctgctaaataacgaagctgcttttcttgtttcagccgttttaattcagaaatgctggttaaaatgccggaatgctggctttcttcatccgggtttgccatgaacagaatatggcccggcagctgatcgcgccgttcagaaaagtgaagcagattggcgagatgaacggcaataccgctctgcatatcaaccgaaccccttccgaacatccactcgcctgagcgggcgtcccgctgcacatcccgatcaaattcatagtttgagaaatattccgcgagacggtcggaatcaaaagcgatatcttttaaagggccgaaatcctcgatgccgaccgtatcaagatgagcgtgataaatgaccgtattcaggctttcgccgtttccctcaataaatgcgaaaatatttttgcggccgtaagggtcctcaggaatcgcctgctcccacacatgtgacggattctcctgaaagtagggaaagctcttgatcatatctttgatatagtcggctttttttccttctcccaatgtgccgttgatgctgtttaacgccaccagtgatttcgtaatggcttctattttctcctccggaagcattttgctgagctgctgatacatgttccatcccccttaccctcatatagagaaaatagcgcgactctctttttcatcgcgctatttccgaaagattaataggcttcagacgttgtttttgcctgcatatgaagaatcagatagtcaggtcctccggcttttgaatcggttcctgacatattgaagccgccgaacggctggtatccgacaatcgctcccgtacagccgcggttgaagtatagatttcccacgtgaaaatcttcgcgggcgcgttcaatgtgcgcgcgggttttcgataacagagcgcccgtcagtccgtaatcggtattattggcaatctcaagcatatggtcgaaatcacgggcttttgagatcgcaacgaccggcccgaaaatttcctcctgcatcaggcgggcgttttcatcaacatccgcaaaaatggtcggctgaataaagtatccttttgaatcatcaccttcgcctcccgtcaggagttttccttctgttttgccgatttcgatataactcatgactttattataagatgcttcgtggatgactggccccatgtatgtatcaaaatcttccggacttccgacggtgagtgattttgttaaagcgacggctttttcaacaacttcatcatagacgtcctgatgaatgaccgcgcgcgaaccggctgaacatttttggcctgagaatccgaaggcggaatacacgattgaggaagcggcaagatcaagatcagcatctctgtctacaagcaccgtatctttccctcccatttcggcaatgacccgtttcagccacttttggcccggctgtacttttgcggcgcgttcatagatgcggcatccgaccgcgcgggagcctgtaaacgacacaaatctcgtcttcggatgctcaacgagatagtcgccgatttctcctccgtcgcccggtatgaattggagcacgccgtccggcaggcccgcttctttcatcacttctacgaatttcgccgccacgacaggcgccgcatccgccggtttcagcagtatcgtgttgcctgttacgatggcggctgccgccgttccggccataatcgcaagcgggaagttgaatggagaaatgacaattcccaccccaagcggctcatagtgatactgattatattctccgtcacggctctttacaggagaaccgtctttcagcttcagcatctgacgggcgtaatactctaaaaagtcgatcgcttccgccgtatccgcatccgcttccttccacggtttccccgcttctttcaccaggtacgcggagaattcgtgctttcttctgcggatgatcgccgccgccttaaacagcacattcgcgcggtgttccggccgtacttttttccatgtttgaaatgcctgcagcgcagcctgcatggccttttccgcaagttcttttccggctgccgatacagaaccgatcacttcttttttatctgccggattgacggaaatgatctttttatccgtttcaatcgcttcaccgttgatgataagcggataatgcttgccgagctgtgaattcacataagccagcgcttcctgaaacgattgtttatttgtctcttcctgaaaatttgtaaatggttcgtgtgcgtatgaaactgtcattagaattcctccccgtattttgtaatgtgtgctcacgcttaatgaagatgcaagaagcataccagcatagcaatttgtgataaaaataggaaaatctttgccgaaagcggacgaagcttgtccgaacctgtcagctgcaatctgaaaacgcaaagaaattttgcgatccgctatataactgatgcaaaatctctttgcggataacacttatacccagccgcggaaccgggccgcttcagccgactttctgatgcccgtcatataggcggccaaacgcatatcgactttgtgggtatgcgctgtctgataaatggattcaaacgaattcaccatgacgctgcgcagttttccggcgacttcttcctcagaccagtaaaagccttgattattttgcacccattcaaaataagacaccgtcacgccgccggcacttgccaaaatgtccggcacgagaagcacgcctctttcattcaggattttcgtggcgtctatcgttgtcgggccgttcgccgcctccacaatgattgaggctttaatgtgatgggcgttttcagccgttatctgattggagattgcggcaggcacgagaatatcacagtccttttccagcagctcccggttcgttatgacatcagagaagagattcgtcaccgtgccgaagctgtcccgcttatccagcaggtaatcaatgtcaaggccgtcagggtcatacaaagccccgtgggcgtctgagatgccgatcaccttggcgccggcgtcatgcataaatttagcgagaaagctccccgcgtttccgaacccctgaatgatgatccgcgcattttccaacggaatcccttttttcttaacggcttcctcaatacaaatcgtgacaccttgcgcggtcgccgtctcccgcccctgtgaaccgccgagaacaatcggtttgcccgtaatgaatcccggtgaatcaaattctctcaggcggctgtattcgtccatcatccatgccataatctgcgagttggtatatacgtcgggagccggaatatcctttgtcgggccgacgatctggctgatcgcgcgcacatatccgcggctcagccgttccagctctccgaatgacatcgtccgcggatcacagatgatgccgccttttccgcccccgtaaggaagatttgtgatgccgcattttaaagtcatccagatggaaagcgccttaacctcttcttcactgacttccgggtgaaaccgcacgcccccttttgtcgggccgactgcgtcattatgctgtgagcggtagcccgtgaaaacctgtactgagccattgtccattttgacggggatgcgtacggtcaaaagccgcatcggctctttcatcagttcatacatattgtcaggatagcccagtttgcgcagggcttcttttatgatcgattgtgtggacaagaacaaattaagaacttctttttcttcatctttctgagtgcttttagaaagcgggttggctgacatgttttatcacctcatcgtattttacgtgtaagcttcaattaccggcagaacgaaatgtaagcgcttttacaccaaaacccatcaatccctttcacattgtcgttacacccctttttatatgcaagattcatgccaggattttgcgcataaaaaaagaggctgttgtcagcctctttcatcccggattaacgcgggtcaataaccagctttgtttcggcgtagagactgccggcccccaaaccgtttacgtaatcgcctttaattgtatacgtgcccgcgcgcggaaggtttttacgcaccaggacgagattgtattcagacgcgcccaataagtcaagggtaagcggaagtctgaccgtttttccgtagttgagaatttgcgtttctttcagtgttcttccgtttacagagtccctcacagtggcgttgaacccgtcaggaaattgaaattcaacggcgccgacggcaagcagcgcattcggcttgtatgtgacttcaatatcagacgtcgcgtattctttcgtactattgacggttttcgcttcaataacggcagattgggcgttcgcatgaaaagatggcaagaacacagctgaaaataccgcagcactgatgagaaaggcagaaaatgattttctttttaacatcatgaattcctccagatcatataggattcagagcgtcctctgccggaaaagcgtgtctgatgattccattcgcgaattgggtttctcttttcctgagaataatctaccacctttatccatggaagtaaattattttttggaatattcaatcatttatttttcacgagatgaaccagcacaaaaaacgaagacatccgctgtcttcgtcttgtgcgctaccgatgagccgtctgccagtcaaatccgatgctctcatcattccacgggattcttttttcgtcaggctgatccggattgtaggacattgtcgtgaaataaataatggtcagcggggtttcgcccagcactctgtacccgtgtgcgacgcctttgggaatgagaaggagcatcggattgtcttctcccatgtagtagacatccgtttctcccttggttgccgactcttcgcgaaggtcatgcagcacgacctgggcgtggcccgtcgggaaaaaccacaggtcatcctgtttctcatgatagtgaaacgctttaatgacgccgggatagcttttggaccaggaagcctgcccgaaacgctctaagagatgttcatcgtcacggacgagttctgagaaaaaaccccggtcatcgctgtgtttgatcagctttttaatttttacgccttcgatcacttgcactgtccctccctttgtaaataatcctttagcgcttcccgccaatgcctcatgccgagcccctgccgttcaatcgactcaagactcaacaccgagtaagcggggcgcggcgtctcatttccgtattcctccgtcgtgacgggcagcacggcggcggttctgccgctttcttcaaaaatagccttggcaaattcataccagctgcacactccgctgtttgcggcgtggtacaagcccggcggcctgtcaaacagaccgatcaccgtttcggctaaatcctttgtgtacgtcggcgctccgacttgatcgttaacgacacgaacctgatcatgtgtatccgcaagtttcagcatcgtattgacaaagttgtgcccgccgctgccgtacacccacgacgttctgataatggtgtggttttttcccgttaaccggatcagttcttcgccgagttttttgctttttccgtaaatcgtgcccggatctgcgggatcatcggtctggtatggccgtgttcctttgccgctgaagacgtaatcggtgctgatgtgaatgaatttcgcgccggtgttttcagcctcaagcgcggcataataagcgccgattccgtttattaaatacgctttgtcgagctccgtttcacatttgtcaacggaggtgtatgccgccgtattgacgacgatatccggcttgtaatggctgaacgagtgccgcaccgaacgctggtcggatatgttcatcatcgcttttgtcaaggcgatcacttcatacccttcccgcttcagctggcggcataactcccgccccagctgaccggccgctccggttactaataccttcgtcaatcggatccccttctttccgattagtcttggctgtctgtataccagcgaatggttcttctcattccttcttcaaatgtgacgtcctgccgccatcccagctcatttttcagctttgaagcattgatggcgtaacggcggtcatgcccttttctgtcttcgacatgagcaaaccgttcctcgacaccgagctccttcatgataaatgacgcaagctctttattcgtccgttcatttcctccgccgatattgtaaatttcgcctagtgttcctttttccagcacgagcttaatggcgcggcaatgatcttcggcaaacagccagtctctgatctgcatcccgtcgccgtacagcggaaccggcgtgccgtttacggcatgcctgataatggtcggaatcattttctcgtggtgctggtacggcccgtaattgttgctgcatctcgtaatgatggcaggaagcttatgggttttcacataagacatgacaagcaggtctgagcttgccttgctggcggaatacggattgttcggagaaagcggcgtcgtctctgtaaaagcgggatcatccggcgccaaatctccgtacacctcatctgtggaaatgtgaatcagcctgccggcttttccctgtaacaccgcgtcggccagtcggtatgtgcccatcacatttgttgtgatgaacggctctgcctgatttatgcttctgtccacatgggattcagccgcaaaatgaatgacagcgtcatacatttgggaaaagactttgtcaatgtcctctttttcagaaatgtcacctttgataaaacggaaacggccgttcttttttaaggcttctatttcaagcggcctgcttgcatacgtgagattatccaggacggtaatctgcgcatctgtttctttcagcatcatctttgtgaaggtaaggccgataaatccggcgccccctgtaattaaatatgattttggcatgattaatgctcctgtcctttctgtaatgcctgatgcgccaggcttccggcgagatagagcgattcatgcgtgcccgcatccacccaccagcccgttaacacatcatacgtcagctcactgtgttcaatgtataaattattgacatccgtaatttccagttcgccgcgttttgaaggagaaatttgttcaatataagaaaacacttctgcgtcgtacatgtagatccccgtgacgcatagtctggtcggcggctgctccggcttttcaatgatcgacttgatccgtttgttttcctcatcaatctcggcgatgccgaagcgctccggatcgtcaacttctttcagcagcactttcgctccttttccctgctttgcgaaacgctccgtataaggttttaatgaatcttcaaaaatattatctcccaaaagcagaacgaacggatcgcgcccggtaaaccgctttgcgtatgataaaccgtcggaaatgccggatgcggctggctgaacctgatatgtgattgagacgccgagctcttctccggtttcgagaagtttatgaaattgcggaatatattctttttgcgtaatcagcaagatatccgtaatccccgcttcttccagcttcatgatcgaccagtaaatcatcggatatggaccgacagggagtaaatgcttattgaccgcttttgtcagcggcataaggcgtgagccggtgcctccggctaagataacacctttcacatgaacacttccttacgtgtggttttatcacaaatcataaagaatcgccgccgcccgtttaatgcccctgccgtcaaccagcggctttccgttctgatgaagcccgagccgtctcggataatcagcagccagctcagacatatgccgagcgagcacgtccgccgcggtgtgttctcccaggccgagatgaacggcggcctctcgtgcggcgaatttttccgccgtctcagtttgatgctccacttgagaaagaacgatgcagggcacacctgtacaaatggtctcatataaggtgatcccgccggacacgatggccatatcagccctcgtgagaagcgcggccatgtcatttgtctgccttaccatctcggcataaggcatttgtgtgagatgcgcgcgcacgtcatcagcatgaggcgccgcgccgcccatgacgatgatcactcgtttccgctgaatatcagggatgcggcggcatgcttccatcactttaaagacaagcttcttcgggtcgcttcctcctaaagagaccaatatggttcggcattcttttctcagctgatagagctgctttgctttttcaaaacccggatgaagaatcatataatccgggccttcatataccgcggcgctgcccatttgaaccgtccggcttttcagcccgccgtaaatgccgtttataacggcatcgcataaatgaatgacatgttccctcttttcttcaaataagacgatacgagccgatgaatgctttttgatttcctccagccagtcacacggcatatcgagcagatcgaatatgagaaggtcgggagcccgcgtgtttatttcccggacaataaattccttctgtcccttgtcaggcttgatgatcacttcccattgatcagatgatagataagaagaagcctctttatttgtgtagaacgttattgagcagttgttcttaatggcaccggcaagcagcttcatccgaaccgcgtgccccatgccgatgtcacggcccccgtccgcgaaaatcaaaacccgcacgctaatcagcctctttttgccggatcatttgattaatggccctgagctccggatcacgattcagcagatggatcaattcttttgccggaatatcaggacgcgagcccgcttttacgtacagctcgcgggccagcctgtagtcctcttctgtatcgacggtcatccgcaagtgaggagcccggagttcctgcgggggctcaggaaagagaagccggtacctctcaggggattctcttatcaaaagggtgacatgctcctgatatttgtccgccagcgttttgtccgcattgatctccgttaaaaggcgcgcgttcaccgcctcgccgccgatcccgagcggtgtaccgcagatatacgtgtagtctgcgtgctgatctaaatgcgattgaatcagaaaatcaagcagcgaagggtcgacaaacgggttatcccccgtcagtctgactgcgatgtccggttttacttgttcgatgacttgtgcaaaccggtcaagcacacgctgttcgctgccgcggtggacacggtagcggttgctgaggcagtgcgcagacagaatgtcgtcggtcttgctgtcagacgcggcgacgatcagattatcccgtgattgatcgtaaaacgcactttgacgaacccttttgacaatcatatcgaggatcgtatacccgccgatcggtttcagcactttgccgggaagacgcccgcttcccatccgcgcctgaatgataaacaaaatgtcagtcatcatatgggctgcctttcgtcaaaaggtcatcccaagtgatgcccgtgtcggcggggatatccctgaccgcacgcgcgccgtcagttaaaagctcaaaatatctcgggtgaagcccctgcggtttttggccgggacgaaggacggcaaggttttccgccgtaaaatattcgcctttttgaatcggcgctgttgaaaaaatgcctctgtaagcaaaccttctgatatccccttcaatcggtgtcgtcgttttatgggagcttcccgacagcacttccggcaccggagcgtgatgcccctgccgcagctccgcttcaactgagcggatcgccgcaaccatttcttttaattcatccggattgagggcgaaggagtgatcagcaccgggcaggtttttatcgatcgtaaaatgcttttcaatcagtttcgctccgagcctgacagccgcgcacggcacatcatacggatgggcgctgtgatcggagaaaccgatcacagcatccgggaatgcggcggcaagcatgggaatgacgctcagattgctgtattcaggcggcgcgggatatttcgccacacaatgcatgatcgcaatttctttgttcccctcgccggtaatggtttgataagcctcctgaatatctgaaatatcagcgcccgcggtggaaaagataatcggggtcttcagccccgcgacatatttcaataacggcagatggttcagctcgtaggaggcgattttaaaagctgaaggggaagtcgcatacagtaagtcggcagagccttcgtcacataccgtgcttaaaaacagcacgccttttttcttacaatattcaagcagcggttcgatccactcagcgggcatttccattgattgcaccaaagaaaaaatagagacgttttttcccgcagcggttttgtataagccggggtctttctgatacattttgtcagcctgaaacatttggaacttgaccgcatccgcgccggcctcactggccgcatctatcaattcaaacgcctggctcagttttccgtcatgattaattccggcttcggcgatgatgaatacgggcgaaccttcgccgattgacttcgttccgattttgcatgatgccatcagtccgcctccttcccgggccacacatgatagtagtaaaaggacgcatccgctttaaatcccattctttcatacaggcggatggctcttacattgtggagctgcgttcccgctgatacagtcttatgctgaaagcgcaatgattgttcaatcacgtgcgcagctaaatggaatcccgctccttttccttcaaatcccggctttaccgccatcagatcaaggacgaattcatcgcctttagacagcccctgaacaaagcccgcggtctctcccttatatttggcgaggaattgtaacgaagctctgccttccgcgttattccgcgcccactcttcaaacagacggtttgcacttttatagctgagatgggggtcctgataatacctgctttttgtaaaggcgtcgcgggccagccggctgatcgcttccgtgtcgccgggtccggcttctgtaatctcaaacggcggcgtgctgttatatacacgcaccggactgacgagcttgagaagactccctacaaaataagcgttcggaagcgactgcacgacctgcatcgcgccgatatcttcagctggtattttaataaatataaaatcagtgccgtccgcccgccttgccgcgtaaaattcctgaaacagccttttgagctgtccggtgctgtttgcggctgcaagcttcacattgatgatattttttcggaacaattgactttcccacgaagagttttcatataaaatcacgccttgaaggctgttttcttccaataaacagagcgacgattcataggcttcgggctgaatgcccttctgatgcaggaaggcatgaatcatgtcctgtgcaagattttctctcagtctgtacacctaatcagcccctttgacgatatccgtaacggctgcaatgacgtattcaacgtcatcatctgtcattgacggataaagagggagtgatacggtgcggtgataatacgcggccgcggccggaaaatcagtttccttatatccgtacgttttttgataatacggatggaacggaaccggaataaaatgaacacttgtgccgatattatattggtctttcaaagcggaaatcagatcgttccggctgatcccggcctcctgctcctctatttgaagaacatacagatgccatgcatgccgcccgtcatcactgacatatgggacggtgagccctttcatgtctctgaaagcgtcctggtagcggctagcaatttcagcccttctttgctgcatgctgtcaatccgtttcagctgatgaagcccaagcgctgcctgaagatcaaacatattcattttatagccgggcgtttcgacctcgtagtaccagcttccgtttgaagaatagcggttccacgcgcctttgctcatgccgtgaaggctgagcaccctgatctgatcggcaagcccgtcatcgtccgtcgtcagcatgccgccttcaccggttgccaggttttttgtcgcgtagaagctgaatgccgtcgcatcaccgattgatccgatcattttctgtttataagtggtatacacggcatgtgcggcatcctctaagacaaataactgatgcttttcggcaatggccaaaatttgatccatatcacacgactgcccggcgaaatgaacgggtacaatcgcttttgtccgcggggtgacggccgcctcaattttttcagggtctgcattcagcgtaagcggatcgatgtcagcaaacaccggaacggcgcctgtgtgcacgattgtattggctgttgaactgaacgtcacggcagacgtgatgacctcgtcgccgggaccgatccctttcgctttcagggccaaaaacaaagcggcggtacatgagttcagcgcgatcgcatgctttgcccccgtccaggcggcaaaggctttttcaaacgcctctactttcggtccctttgaaagccagcccgattcaagtgtatcaataacctcctgaatttcgtccttcccgatcatgggcaatgaatagggaagaaaagctgatcttttttgcaccattttttttgcgctcctatcttttttatgaagggtcaacccgtctgaagctgactccggttttttcctgaagcacttgacataaagcggcaagcgaatcctgaaccgggtagttcgcggcgacaaaagcacggcgcgcctgttccgctttttgatattctgcggggctttcgcatatccggattaattcctgagcgagtgcctgcgggtcctcaaaaacaaattctccaagtgaatgataataagggtatcggcgggttcccgctgattttccgatcagcacgggcttttgaaacagcatcgcttcaagaccgaccgttgatgtctgtgtcaccgcagcgtcaacaaacgggagaatatcatacagctccatctcttttttgatgattttgcctgctttatatttccgcagcacctgattgtaagcatccagcttgtttttgccgatttcccacggatgcggtttaataatgagctgcatgttcttttggccggcaagctcttcaagcactcccgtataaaattcatcagaaaacggctgcgtggcgatcagcaccgtccgctgtgacgggagaaaagaaagtttgcggtaaaacgtgtcccgatctatcggctctcttgagaaaatctcgtcgaaacggggatgccccgtgatgatgatttgttcctccctgcagccttttgctttataccactccgcttcataagccccgaatacagcctgatagtccgtaaatacgggcagaaacgcttcatctcccatgagcgccccgtgctgaagacagatgctgacggcgttttttttcgcggacatcagcgccagcacacggctgtaaatatcctccgtcgtgccgactacaacggcggaaatcttctcggccgtaaacaaaatatcaacggcgtcaatcgcttcaataaataacgggatgtctttatacagtcgttcctgaaattctctgtttccgaaagcgggatggctgtgaagctctttcaaaatggaatgggctttttcaatataagggacggggttccctttttgccccattcccgtcagctccaatttgcagataacgggcagcccatgatggtcaggcagactccatctggccagtaccgctgtttttgccggatcaaactgccggtaatttccctcggtgaaccgaagatgatcgaaatgcagaatgacttttccgtttaccggtttctcatctgttttcttaatgttttgccttttttgatcataataaggctgaataccggcttcaggaatatgctgatccgccggaccgaaaagctccgggttctgctccatgctctcccgaagcgccggactgatatattgataaaaattactgatcaatgcgagcgggatgtctttgtagcgaagtgactgaaaaaggtcaatatactgccggtacagcacccaatagttcgctaagtatgccgacaagccctcacccctttccaagcttttttaatgattccctcagctcccggcacgtggtctgctgcggaaggctgttcacaaactcgtttttctccgccgcgaaaagctgataatggatggattgatcggtaatataattgatatcaagttcctcagaaatcgggtaaaacggataaaaatgattcactctccagaaaaaacgggcgtcaccgatacggtaaaacgcggggctttcatcccaataggaaccgaatgccgatttgacctgttccagcacggaaaaccggtgcatgaccgaacaatggtcaatggcgcacggcgcgttccacacgatccgttcggcgggcctggccgtctccttcaccgtctctttccgctgattcagatgataggttttggaacttgaatacacgacggctttttccgggtcttcatcaagctctttcaccattttctcaagccgttccggcacatacgtgttgtcgtcggtcgcatacgtcacgtactcgccctccgccatttctattgcctgattaatcaaggcggcgtagcgtgttttttccgttctttctttgacgcccgatacatcgctttgataaaaccggacgcggtcatccgtgagaaaaggacgtatttccgccaatgtctcttcatttgagttgtcatccataatgaacagctcaaagtccgtaaacgtctgagacagaatacttttaatagagcgggccacatagtcacttttgttatagctcgtcatgatcactgacactttaggcaactcgtcacccccttttcgcacctgaaactaccgctatcatatgttccttatgcggaagatgcgctagggatacagactattatgtgaaaagtcagcattgcgcgcacaaaaaaagccggctctgatatccggaaacattggatcgtattttcttttttcgcataaatctttctttgggctcatatggtggaatagataaaaacagcagccgctctgtcggctgtctgatacttgtcaggaggtttcagcatcaagaggttttcatcaaaggaggaacaatatgaaaccgaaaaagaatcaatatcagcaaatgcaggggatggggatgggaatggatatgcagggattccagccgcagctcgggcctaatccttatccgcagcctcagggccaaggatcacaaatgatgccgatgcagcagcaaatgacaatgccgatgcagcaaggccagcagggcttcggcggggggttccccggccagccgcagcagcagggcggcggcagctttcaaatcccgtcaggtccatcatcgtcacaaaacgttcccggcatgctgccgattgaagagtcatacattgaaaatattctgcggttgaaccggggcaaaacggcgacgatttatatgacattcgaaaacagcaaagaatggaattcaaagattttccgcggtgtgattgaggcggcgggacgtgaccatatcatcatcagcgatccgaaaacgggcacccgctatctgcttctgaccatttaccttgattacatcacatttgatgaggaaatcgcttatacttatccgtactccatgtcttcttattctccgagataaatcaaaaagccaatcgctcacttgacagaggattggctttttttctttataaatatttgacggccgcgacgataatcataatccaagagatgataaacgccacgccgccgagcggtgtaatcgcgccgagaatggaaatctgcgtcacgctcaatacgtacaggcttcctgaaaacagaacgatgcccgcaaacatcagccagcccgcaacagaaacactgcctgcgccagagagcttttcagccaaaaacgcgacagccagaagaccgagcgcgtgatacatatgatattgcacgcctgtgtgccacacctgcaaatatttatcggggattttcccttcaagcccatgcgcgccgaaagcgcccagcgccacggccaataaagcgttaatcgcaccaagaataataaacactttcatctatttttctcccgccttttcgttaaagtttccaattcaatcataacccaacatcggcaaaattcaacgtccgtcatccgatgacacgagattgtcggattttttctttttgataagctggattcggtcaatcgctatcgccagcagcgttccgagcacaaggccgttgcttaagagcgaaatcaggatcggatgcatccctgataacgcgctctccggcacaaacattacgccgacccccgtgaggagcgccagaccgataatggaacggattcgtttttgctccgctttctcataagagtcaaactccgtaaaggcaagacccgccatcgtggagaaaacgacgaagtttaccgcaaagccgaccggtgagggcagactcgcaaacgcattcataaatagcgggatcatactgatgatcatgacaaatacacttcccaaaagaaacggctttttcgaaggaagcttcgtcgtctcaataaaaccggccgcccctgaaatcggcacaggcgcaatgccccctgacagcccgctcaaaaggtggctgatcgaagccgcaaaccctgccggacgctcacgccgtttcccaacggtgccgccgaattttttcaccgccgcttctacaacccggatgctcgcgagcatgttgacaatcaaaagcacggtaatgaagagtgacgtaatgatcaggccgctgtcaaacacgggttttccaaacggaaaaagaaccggcagctgaatcacgcgatccggtatttgaatcggtttggcagcgccgaagacggcgaataagatccatccgccggcaagcgaaaggagaatcgcatactgtcttaagaacgtaacattcgatcgggacatgatgaacatcgccgccgtcacaaccattgcgagcccgaatacaaggccgtcgacgctgttttttaaatagccgatgcccaaaaggcctttcacaatcggctgactcagctgcatgaccaacagcagcagatacacaccggtcacaaccggcgtaaacagcacggccagccgttcaatcactttaaaaaggctgaacaaaaagaaaaagacagcgcttaataacagcgccccctgcagcgcccgcagcgtctcgccgaatgtcgcaaacaccgtgcccgtcagtccgccgtaaatcgtgtatacgccccaccataagcctgccgggctttcattaatcggcagacgatgtccctggagacattggatgaccgcagcgacgccaagcacaaaaaatgtgctctgaatcaatgcggcagaatcggcatggttcaagtgaaatgattgtgcgatggcgacaggaactacaatcgcagccgcaatcataaatgccgtccattgcaaacccccgagtatcagtttcaagtcaatcaacctctcctgttaaaaatcgaaaatggaatccccgtttccgtcttcctcacgttcgtctttcgcttttttctgatattggttcagcccggcgctgcccatcattttttcaagcagcagcgggtctgtcgaaggagacgcggaaggtttcggcgccgctttcggaatcggattctgcacaggcgccggagcggtgtgcgtctgagtgccgagcacgacatcacacagagagcggatggcggccgcgtgcattttgacctcctcggtgcgggtcgccgttttcgcctgcctcagttcttcttccatcttctgaattaaagcagagatatgtatgttcatgagtaaatcctccagcagtaatttgtcttcttcctgcattttatcaaatttctgagcggatcgcagaattgagtttgttattttttctgacggcataccgcccggaacatcaaaaaagacgcttccgccgggcggaagcgcctcaaaaaaccgtttattgcggcaggtcggggatgcaccaatcgatcggctgctcccccattttttcaagggcggcgtttgtacgggaaaacggtctgctcccgaaaaaaccgttccttgccgaaaacgggctcggatgagtcgattcaataataatgtgtttcgatgtgtcaatgcgctcttttttcatctgcgcgtgacgcccccacaggataaagacaatcggcttctctctttcattcaccacatcaatgatgcggtcagtgagccgctcccaccccttgcctttgtgggaattggcctgaccgcggcgaaccgtaagcactgtgtttaacaaaagcactccctgcttcgcccagctgacgagcgatccgtggttcggtacggggcagccgatatcgtcctgaagctctatgaaaatatttttcaaagacggcggctgtctgaccccgggctgaacggaaaaactaagcccgtgcgcctgtcctggcccgtgatacgggtcctgtccgagaatgaccgcttttacatcctcatagggcgtataatgcaaggcgttaaaaatatcatggctgtcaggataaatcgtttggctgctgtattcttgtttcagcatctctctcagctcttgataatacggtttgtcaaattcatctttcagctgattccaccagctgtcttttaaaagctgtttcaaactgtccgtcccccttatgaactgtgcagtcttgaatggacgggctttccgtcccacacaatgtcagtcggcgcctcccgcctcttcatgtccggctcttctagaagaaccgcgaagtttttcgtcgggagctccccaagcccgtgcttttcgcttaaccggtctaagtaccgcttccgtttgccgccgagatccgcggactgattgccgcctccctcaaaaaacgcatatatgacgctcgcgcaaggaacacgcttcacacggtgctgtttcgcggcgcgcaaataaaagtcccagtcccaataattatggacatccggatcaaaataccctaacgtgtcatgcagagaacgtctgtacatgctgcctgacggaacgtacgtggaaaatacccgcatatccgcaaaatccgccgtataggcgaacggctttcgtgacaccgggtatctcgtgccgccccgttcttcaaatgacacaatttccgcgtcagaatggacaaaatccgcatcagcaagtgcagccgtcattctttccaaatggcccggcgtaatgaaatcatcatcatcgcacagcatgatataatcaccccacgcttttttcacacctgcgttccgcgcttccacatgtccggcattctgttctaaatcaataatctgaatcggcagatcgctgtacagctgcttcgcttgttcgaccgattccccggcatcatttacgatgatcacttcataaggctttatggtctgcctggaaatcgactccagcagctcacacaaagccggaatccgattatacgtgactatgacaattgatatattcatgacccgctccttctgctttttctcatgttctattaaaacataaagcggcggagagatcagggggatttttgatttcggcccattcagaaacaaatccacgtcatccccgccagcaaaaccagaatgatcagaaggtctccccaaacagtgcataccgccttggcattaagtctgcccgcctccatggcattccacagttttgattgataaacaggcaccaacaccatcgcatagcatgtgcacaagcagacaaaagccggcgggacaagcgcacatccatcctcatgccaatcatgaatcagttccggtatactcaccccgctgtcaatgtacaagtataatatacccgccagcggaatgagcgagctgacctgcagctcgaaaagtttcaccttccactcacgcgcaaacgaaacagcccaaatccatcccagcgcataaaacaatagaagaagcaaaatactgaaaacaacaaaagtagcgtcttgcatcccattcagaaccataataaaaagactcacaacgggcaaggcaagaaccaagccgcagacggtaaatacggtaacggctatttgggcgcacgcgccgtacatccacgaacctaatctcatataaacacccctatatagattccctatgtatatagtgaaaaagatcaggcaagtctctgcctgcctgcgtaaaaacctattttgccgcaaaacggaaaacataccgtcacaacggcgcatactgccgcaaaactcggtgtgaccgccgaaggaaacagcccagccggaaccagattgaacaaaaagacaaacataaaacatagattcggcaccattgaagcccataccgtccgctcagcaagctttttgccgccagccccgaactctttgccagcttgatagccgatttggaaccaatacagcacataaccgatcataatcagccatactgacacggaaatccctttccacagcgcgtcaactgcgggatgaatcctccacgcgtgcatcatcgtaatcatcgcccccatcacaaaaagaccgcagttgcagaacagataaaagagcataaaagtccgcgcgggcaccgtcgaagctttttgaaaagcagagataatctcagacggagtccccacttcccgcagaataagctccatcgcttcgctttcggttttgcctttttccagatgaacacaaatggcatgatgaatatggctttcgatttcctttaataattcacggcttccggccttgccttccagcccttttctgatttcgtgcacataaaggtctttatccattctgcccgccccgcttcagcatccggtccatcagagcggagaacagattccattccttcgtccgttcggctagaatgttttttccttcatcggtgatccggtaatattttcggtcgggccctttggtctgcttttcccagtaagaagaaatatagctttggcgttcaagcttatgaagcgatgggtacagcgtgccttccttcatttgcagttcattcccgcttcttttctccatttctttcacaagttcatacccgtacatgggccgttcattcagcagcgtcagcaccagaatgaccgtgcttccctttacaagctccctgttgagcatttattttctcacccttacctagtaatcttatgtaggtattgtacgcacatcccccgcggctgtcaaatcattcctccaagccttccgtattgtgatcgggagaaaatctaactataatgagatataaaacactgatggaggccattgatatgtcaatgcacaaagcacttactattgccggttctgattccagcggcggcgcgggaattcaggccgatttaaaaacatttcaagaaaaaaacgtatacggaatgacggctttgaccgtgatcgtagcgatggacccggagaacagctgggatcatcaagtatttccgattgatgccgatacgattcgcgcacagctggcgacgattgttgacggaatcggcgtagacgccatgaaaacgggaatgctccctaccgtggagatcatcgagcttgcggcgaaaacgattaaagaaaaacagctgaagaatgtcgttattgatcctgtcatggtctgcaaaggagcgaacgaagtgctgtatccggagcatgccgaagcgcttcgcacccaattggcgccgctggcaaccgtcatcacgccaaacctgtttgaagcaagccagctgagcggtatggatgaattaaaaacggtggaagacatgaaagaagcggccaagaaaattcacgaactcggcgcgaaatatgtattgattacaggcggcggcaaattgaaacatgaaaaagcgatcgacgtgctgtatgacggagaaaccgcggaagtattagaaagcgaaatgattgatacaccttacacgcacggagccggatgcacattctccgccgccgtgacggcagaactggccaaaggcgctgaagtgaaggaagccatctatgcggcaaaagaatttatcactgcggcaatcaaagaatccttcccgctgaaccaatacatcggaccgactaaacattcggcgatgcgtcttagcggaaaataaaataaatatcccctcatgatcgagggggattatttcatttttttcgcggatgaccgcaaaaacatctcaatcgattgcacaaacagcgcatattccttcatctgttcatatgtatgcctcagccgatcactccattcattgtgcggctcagccctcttgagcatgcgattcagctgaagcaatacttctttatattcttcccgtttatcttccacttgctctgcagctttgacaagtaaacatttcggcgtcatcttctgatttttcaaaactgagaaaacaactccttttattcctggaatcataggctttcgtttgaagaatagcacagatggcataggtttcacataagaaaaaagaacgattttctacaaaagtgtccaaattgaggcatttatttccgttttcccaaccgaagtgacggttacgtcatcatttcccgggaaaggaaaatatctggcgctgaatacctcttctccatcattcaaaaacaattcaatggaggatgcatccagaaagagctggacggaatgcagctcgctgatggcgcagcttctcttttctttttcttctccgctgaaagcggtgcgctccagcacagccagcccctcttcctgatgaaatataaaccgggccgcgccccgaattgagatttcaaaaccggattcgcaagtaatgtcttccagcagcacttcagcccgggacgcatctttcaccgggaggcttacagacgagcaattcaattgaagacggcgcttttgttcatccgtgcggcgcgatttcatttccgggagcgggcgctgtatgattctgccgttggacagtgacagctgtctcggcatcgttaagcagtgaatccagtgatacgcatgtgtcggatgcttgtcctcatgctgatccggaacgcccatccacgcgaacagaatcctccgtcccttatcatcttccagcgtctgcgccgcataaaaatcaaatcctctgtcaagctccgtaaattcaccgtgcttaaattctggcggctctgtatgcagcctgccgaggaaatagcccgcctggtggctgttatgatattttatcccgtcggcttcaagcccctgcggacatacgagcagcacgtcggttccgtcaagagaaaacaggtcgggacattcccacatatagccgaatgacccgagaccgcccgagtccgcccccgcaatcgaaccgagaaacgtccaatccgtcaggttctctgatgtgaacaatacagcgcttccggtgagcttttctgtctgcgcgccgagcaccatgtaatacgctccgtctttcttccaaaccttcggatcacggaaatgagcggtatagccttttgggagacgcacgacgattccttttttttcaaatacgatcccgtcttcggatacggcgaggcattgatacgtttcccgatttccttctccgtcacggacattgcctgtgtacatcaggcagagccgcccgtctttttcgatggcgcttccggaataacagccgtttttgtcataccactcacccggcgcaagcgcgatttcttcctctttccactcaacgaaatctttcgtcgtcacatgcgcccaaaatttcgcgccgtgccccgtatgaaatggctgccattgaaaaaacaagtgatatacgccgttccattggatgacgccgttcggatcatttaaaagcccgaccggcggcataacatgatagttctggcggtatggatctgacgcggctgtttcttgccgcttctttttcgcttcctcagcctgcaggcgcagctcttgatccggtgtcctcatttgacggcctccttttctttagctcccataatgtaagcggcaataaacgccgagacagaggcgatgcccattccgatcagatagtttataagatttcctaaaccgagcggagccgtgatggcaatcatcggaattccggtcagaccgtaagcattggcggcgacgccggtcaccacgacataggcccctcccagcgctccgccgatcattcccgcgataaacggcttccggtaccttaggttcacaccgaaaataactggttcggttacgccgagaaaagcggaaaatgcggcaggcagagcgatttctttcattttcgcttttttcgtcaggaaaaatacagccagtcccgccgcgccctgagcgacattcgccatcgaccagataggaaggatatagtttctgcccaaatcagcgatgaggccggcctcaatcgcatgaaagctgtgatgcacaccggtgagcacaataagcggataaagaccgccgaaaagaagtccggcaacaatgcccgcgtgatcatacacatatgtcagcgagacggtaatgcccgatccgatcgccctgccaagcggaccgattgcgataaaggtgataaatcctgtgacaatcaccgtgacaaacggggtgaccaataagtcgaatgcgtgaggcaccatttttctcgtgcccttttccactttgctcataatgtaaacggctaacagtacggggatgaccgtcccttgatagccgagcagcgcaatgtcgaagccgaagagttgcataaaatcaggcgatgcatccgcaagcccccacggattcaaaagcgccggatggatcataatccccccgagcacggcaccgagataggcattgccgccaaattccttcgccgcactgaacccgatgaatacgggcaggaagataaacgccgcgcttgaaaacatgtctaaaagcttaaacagcgatgattgttcagacacccagtggaaagccttcatcataccgagcagccccattaaaagtccgcttgccacgatagccggaatgatgggaacgaatatgttagacagtgttttcgcaaatcttgcggccggattcagcttttttttcgccgcgtcctgatgtgtctcacgatcctcccgccccaaatcggcttcttttgaaaaagcgtcatacactttattcacaaggccggtaccgaatataatctgatattgccccgagctgctgaaagccccttttactccttctgtctcttcaatatcggcctggctgatcttctgttcatcttgaatgacgagcctgagccgtgtggcgcaatgtgtcgcgctgatgatatttgatttccctccgatatgtttgataagctgttttgccgtttcttgataattcatgatgtatccccctttctaaaatcaaaaaagacctaaaattcgccaacgaaaaaggtcagcatgatccctttttcatgtacgcaaattttaggtcttgcctgcattaccagtcacaatcccgccgattcagttttttaatgcgctttcattttatttcatgatagcgctttcgtcaatatgttttcaaaaaaaaagtctgtttctcgaaacagacgcgttattccgggtttttttgcagacgctggacatgcagcgtaatatagccggcctcggattccggcagttccaaatcatattcattttttaaaaacgccgccagttcaagcgcacaccgataagcaaacggatactttttttggatgaaataaagcatctcctcgtccatggaatggagtgcttcatttgagtccaaccggctgaccgcataccgtaagtgcgtgacgaggcgctgataggaaatactgtcttcatccaccttctgttcgaaaaaggattcgatcttttcgatcatttctttgatcatggttgtatgcttcatcgccgaatacatgcttttggcatccgccttggcagtgtggatatgaagcgcgatataccccgcctcatcatcaggcaatgatataccgagggtttgtttcacgtgttcaaccgcccagcggccgatttcatattcttttttataaagcgccttaatttcatgaagcaatcggttgtgcacctgaaggccgttttgaatcctttcgatcgcaaaggataaatggtccgccagcgcaatgtggatgtgatcgttcaaaggcgccgcaagctctccctccgcatggctgatgatatcttcagccgcctctatatgctcttcgggaagcgtttctaacacttgtttgaacttttcattttcgtcgtgcacgacaaatattttttcaattttatgtttttgaatcacatcattttttctcttttgaaaagcgattccgggacccattacgatcttttcccgtccgtcttcttttattaacgccgcattgttatttaatactttgtctattctcaagaggttcgctcccgttcatatgtttagtgggattgtaccctctttttcatatgatgtaaaggtgccggacccgcgcgctcccgtttcggcaattctttgcggacaggcatccatcggtttttatccagcctgccgcgggccgatttcgtttcatcggtcaaatccgccgatcggactcggctcacaaacgaaaaagcaccagccgtccgcttcgctttcttatgataagccgcttggtttccgtacacggcggctaatggatatcttccgttacccggcgccatccagttcatcagaaagaccatccacacccgtaaagatactagcaaacgtttcattgcaaatcatccctccgcttctttttgacagacagcttgttcgcaggcctgtttttctctccgctttaacggaaaaggcggccgatccttctccgctaaaaactagcgggtctagcaaccctatgactctatgatagacgcggccgggcgaattgtttgtcacaatatgagtgaaaaaacaaactagttttcagaagttttgttgaaagctgatggaaatgacctgaaaaatggaaaagccgataaaaaaagttatacacaccttatcccttggttaagcacagcttaaacacagggtatatccacatatccacaaactcgatctatattttgtatgggaacactcgttcccaacaatatatatacacaattttattcagttatgcacaggattctgtgtataactccctccttattcacagaccaatttccataaatgagtcatatgtcacaaggattattttgaattttcaagaaatatatactagatttctaatttagataaagaaaaagggggaaacacgattgaaaaaaggaatcatccgttatctgcttccggcttttgtcttatcctttaccttatccacaagttcacaggctgcgccggcttcaaaaccgcaaactcctgatcttgagaaggctgaggtatttggtgacattgatatgaccaccggcaaacaaacgacagtcatcgtcgagctgaaggaaaagtcactggcggaagcaaaggaactcggcaaagcacagacaaaaagcaagctgaaaagcgaacgctcaaaagtgaaaaagaaagcgctcaaaaccattaaacacggaaaaatcaacagggaatatgagcaagtgttttccggcttctccatgaaactcccggcaaatgaaattccgaaactgctgagtgatcaggatgtcaaagcggtttatccgaacgtcacctatcataccgatcaactgaaagataaagacatcaccctatctaaggatgccgtgtctccgcagatggatgacagcgcgccttatataggggcaaatgacgcgtggaagctcggctatacggggaaaggcgtcaaggttgccattattgacaccggtgtcgaatataaacaccctgacttaaagaaaaatttcggacaatataaaggatacgattttgtggataacgattacgatcctgaagaaacgccgtccggtgatccgagaggcgcgtcgactgaccacggaacccatgtcgcgggcacggtagcggcaaacggaacgattaaaggcgtagcgccggatgctacactccttgcctaccgtgtgctcggtccgggcggaagcggaacaacggagaacgtcatcgccggtattgaacgcgccgtacaggacggagcggatgtcatgaacctttctctcggcaattctgtgaataacccagactgggcgacaagcacggcgcttgactgggcgatgtcagaaggcgtcacggccgttacatcaaacggaaacagcgggccgaacaattggaccgtcggctctccgggagcgtccagagaagctatctccgtcggagcgacacagctgccgctgaacgagtacgccgtctccttcggttcctattcctcagcgaaagtaatggggtacaacaaagaagatgacataaaagcactgaataaaaaagaaacagagctcatagaggcgggtatcggcgagcaaaaggattttgaaggcaaagatctgaaaggaaaagtcgcggtcgtcaaacggggcagcatcgcctttgtggataaagcagacaacgccaaaaaagcgggcgcgatcggtatggttgtgtataacaatgccccgggagaaattgaagccaacgtaccgggcatgtccgtgccgacggttaagctttcatcagaagacggcgaaaaactcgtcagccaattaaaagcgggcggcacaaaagcgacattccatttatccgtggctaaatcgctcactgaacaaatggcagacttttcgtcacgcggtccggttatggacacgtggatgattaaacctgacgtctccgctcccggcgtaaacatcgtcagcaccattccgacccatgatccggccgacccgtacggctacggatcgaagcagggaacgagcatggcttccccgcatgtagccggcgcagctgccgtcatcaagcaggccaaaccgaaatggagcccggaacaaataaaagccgctcttatgaacacggcggaaaccttaacggacgcggacggtgacgtatacccgcataatgcgcaaggcgccggaagcatcagaatcatgaaggcgatcaaagcagactcccttgtcgccccgggaagttattcttacggaacgtttatgaaagacaaaggcaatgaaacgaaaaaagaaacctttacgattgaaaaccaatcgtccatcagaaaatcatatcagctcgagtactctttcaacggcacgggcattaccgtttcgggcacagaccgggtcgtgatccccgctcatcaaaccggaaaggtcaatgcgaaagtaaaggtcaatgccaaaaaagtaaaggcaggcacctatgagggaaccgtcacagtgcgtgaaggcggaaaaacagtcgcaaaagtgccgacgctgctgattgtaaaagagccggactatccgcgcgtaacgtcaatcgacgtacaggacggcacaacgcagggaacctaccaaattgaaacctatcttccggctggagccgaagagcttgccttccttgtatatgacagtaatcttgactttgtcggccaagccggcatctacaaaaagcaggataaaggctatcaatatttcgactggaacggcaaagtcaatggtgacaccgcactgccggcaggagaatattatatgctggcctatgccgcgaacaaagggaaatcaagccaggtgctgactgaaaaaccttttatcattgaataaccgaacaaccctgctggagcatcagcagggtttctttctgattaatcggcaaaagcttctcgaagcagacggtatgactgaagtttatcttcaaaatgatgagtaatggttacagccatcacttcttctgttccgtatgctttactgagagccagaatctgttctttcacttgctgcttcgttccgatgatcatccgattccgattatcggcaattcgtctttgttcatacggtgtatacgtattgccgcggacggtttcgtaagacggtacgccgtgaagcggaatcccctgttcacccgcaagcagcgtataatccatgacagccgcgagttcctccgctttctcctccgtatccgcgcacagcacaaacaccgccacggccgtttttggttctttacctaatgcagaaggtttaaatctgcgcttatattgtgctgtcgtgctttctccgccttctccattaataaaatgggcaaacatatagcctgctcccatttctgcgctcagaaacgcgctttctcccgaagaaccgagaagccagacttccggcgccgtcttaataaggggtgatgcggtcagattcggaaaacggtgattgtcatcagctgcatcatgcaaatacatcgccagctcacgaagctgctgcggatattgatcagcattacgcttcccgccgtcattcagcgcccatgatgcgatcggcattccgcccggcgctctccctaatccgagatcgattctgcccggcgtcaacccttcgagcacgcggaaattctccgccactttatatgcgctgtaatgcggaagcatcacaccgcctgatcctacccgaatgtcattcgttttcgccgcaatatggctgatcagcacttcagggcttgagcccgccaaccgctctgaaaaatgatgctctgacacccaaaacctcttatatccgagcttttccgcctcctgcgccaatcttactgtattccgcagtgcactttccgcagaacacccttctgatacaggagattgatccaatatacttaatgaaatcatcactgtcacctcatcaacatcgtaccactgctaagccgttttttctttctgtatgcttatcagcatccctgatgataaacatttatataccttgttccattttgtcgaaatatgttacacgtgaaacataaaaaaacctctcccggtcaggagaggttttttcttaattcttttgaaaacctttatcttttacatattgatttaaataggttctcggtttttgtttcatgaactgcaggatttgatcagaccacgtttcaacccgcttgccgtttgtccgtttatcataataatcggaaatggtttcatcatattccttcatataactgcggaagttttcttcattcgtatcgtacgtgttttcatgatatacggcttgtttcggcaggcgcggcttttgaccggacggatgagcgggatgaccgactaccaagccgaacagcggcagcacatggtcaggtgtaccaagcacttctgtcacctgatcaagttcatttcgaatgcctccgatataacaaatgccgagtcccattgattccgcggcaacacttacgttttgtgcggcaagtgcggcatcaatgatgctgaccataaacatttccgtattctcaagaagctcggtaatgttttctcctttttcctcagcaagttttttatggcggtacaaatcagcgcaaaacacaaacaagtgcccgttattttcgacgtaaggctggtttccggccagtgccgccagcttccgctttttctccttatcggttacgccgatgatggagtaagcctgcacgtaactggacgttgacgccgcctgggcgcttttcactaatgtatctatctcttctgctgtcagaagctcgtcagtaaatgatcggatcgaccgatgattaagtatggtttcgatggtattgttcatatataaagcctccttctctatatatcatatccgaaagagtatcatgccaaaagcgaaatgctctaaacaaaaaaagacagcccgaaaaacgagccgtctcacattaagaattgaacaagtagcttttatatttcgtcagctgcacacttgcgttatatacgatcccgaagctgattaatgtagaaagcaccgagctccccccatagctgacaaacagcagcggaataccggtaaccggcataatgccgatattcatcccgatgttctggaaggtgtgaatcacgataagtgcagtaaatcctacgcaaaaaaacgcaccaaatcggttaaacgcatgcaagcggtcaatcagcaccacaagcctgtaaattaaaaagaaaaacatgacaaccgcaatggcgcagcctaaaaatccaaaactttcacccaaaatcgcaaagataaagtcggtctgtccctcaggtacgtacactttcagattatgaacgccgtttccggtaatgccgcccgatccgatcgccataacggcctgatccacctgccagcttttatcgctctcggcctgagtcgttgccgcactggagtcagacatccacgatgtaatccggttaatttgataatccgcaataccgatcgaattcgccacatggggaaattcaattacaagcactaagaataggccaagcacaagcgcggccgaaccgccgatgatggtgatcagcttccagtttacacctgacataaacaccatcaccataacgataaacagacagatcgcacccgttccggcatcctgcaaaacgatcatcccaattggaataaccgtccatgccgcaattttcaaaagcagattgacatcttcccgaagtgatctttgatctttcgggcccgccttcgatataatggacgcgaccatcatcataattcctattttcgtaaactcagagggctggagggtaaagttgccgatttgaaaccagctcttcgctccgtttttgatcggcgcgatggattccggcgccacacgcaaaaggagcagcgacagcacgccggcaatcaatacatacagactcagtttctcaagctgctctaaatcaaagtacagcaataatccgatgaatcccgcacctataacatagaagacaatctgtttcatccaggcactgcctccatactgcccgaactgtccggccgcataaatcgccgcaacactaattattaaaaacacaccaaatataaaaatcaaatccccctgataatagggattttgctgtttcttatatcgactcattctatcccgccttacattttcatcggaagtcactattgtttattatacatgaacaccgttcaagaaaacatgatgaggttgcttcctttttattttttacggtttggggactacacgacatatgacgtgtcagaaaaggaaatgtttcggtcatgatgaaacttttccgataaaaaaccccttctcgtcagaaaaggggtttcagtctatgtttaacgtcataaacaagctgttcgggtcctctttataatgtgcaaacggatcacaatattgaaaccctgctttttcatacaggcgtctggcggggagaaaagcctccatagaaccggtttctaagctgatccgctgatagccccgccgccttgcttcttcaagcatatggcggaggatccggttggctgcgccttttctgacatgatgcggagccgttttcattgatttgatctcaccgtgccggctgtttagctccattaaggcgccgcagccgagcaggacgccgttttccctcgcactccaaaacgtaacgtcaggctgacgcagccggtccgcattgagcgcgtgtatactttccgggggagaatgcatggtcatgctcttcagatgctcctgcaaaagcgcaatgacgtccggcgctgtgacatcgtcttttgttatgtccacttcaaaaccaccctcgctgtgcatgttttctttgaacatagcaaaggttcacagcctgcgccattcccttgtccggaaatgtgacagggtatttgacctttccggtttcttgtacctatccaaaaatgaggcaatagttgcaatacatttctcgataaagcggtatcaaaaattggaaaacatggtataataattgtaacaaaatgttcaaaaaacgaccacaaaacagacacattttattctctgtatttcattttggaaacgctcccataaaatgaaaggagacatgtaagatggacatgttttttgcttatttactggtcgcaagcgcaacacccctctttatctggctggataacaaaaaagtcgctctttcggccataccgccaattattctcatgtgggttttcttctacttttacgcaaccagcagcctgtcccctctcggccacacactcatgatcatcctgtttgccgtcaacgtcatcgttgcccatatcgccgcctttatcatttacggccttccgcgcctgcgccggagaagaagccaataaaggcacaaaaaaccctcttcgcctgaacgaagagggtttctttttattcctgatgttcggaatgttgcttcgcaccgccaggagggtttccatccatatggtcaccgtgatggtagtgcgccgcaaagatccagatggaaccaaggatgataacaatcgctccgaaaaatccgaagagcgtgtttccgacttgaatcccgccgttttcgctttctgtcatgtgcatgaacatgagaagctgaagaccggcttggataaatgcgaatccgaaaatgatccacagttttgctgatgagcttaaatccgtatataccgcaacccaaagggccagcagggtcagaataatagacaacgcaaaacctacgatatgcttccacggaaagtggctgtgttcagcagatttgtttgccatattatagtccccccaatccgatgagatagacgcctgtaaagatgaagatccaaacaacgtctaagaagtgccagtataaacttgagataaagatttttgaagacgtctgcggcgttaatccgcgtttcttcaattgcagtaagatgccggcaatccagaagataccgatcgttacgtgcgttccgtgcgttcccagaaggacgaagaatccagaccagaaagcacttgtaccgagagatgctccttcatgtacatagtggatgaactcgttaagctcacatccgacgaagcccgcaccgagaagaagcgtaatgatcgtccaaatgacgacgccttttaaacttccgcgacgcatttcatgaacagcgatcccgcaggtgaaactgctgatcagaagcaggaatgtcatgatcatgacaagcttcacttcaaataattcagccggtaagactcctcctgctgttcttctttgaagaacgaagaaggttgcaaatagtgttgagaacaacacaatctctgcccctaaaaagatccaaaacccgagaatattgagtctgccggtttcagattgatattccataggcgcgttagaattgccgtgttctgcatgttccataaatcacgcctcctttattcggaaatctttctttccgtctcttttatttcttcaacaggtatatagtagccattgtcatattcaaatgaacgaagcaccatgcaaagcagaatgccgatcaagccgacaatgcccatccagaaccattcaaatacaagtccgaagccagcaataccgaacgccactgacataataagcggtcttccggagttgtgcggcatatggattttcttgaacttgctttccggatgaatatccgttttgtcttctttcaattgcaggtacgcatcttgagatttcacttctggaagcaccgcaaagttgtaatgcggcggaatcgcagatgaagtcgcccactcaagcgtacgtcccacgccccatgaatctccgctgatctcgcgagtagagtagcggaagctgtagtagatgttgtagcaaaggattaagaatccgacacccatcatgaaggctccgacagttgaaataaagttcaatgcagtccatccgtcattcggtccgtaagtgtaaatacggcgaggcataccttgcagccccaagaagtattgagggaagaaacatacattaaatccgatcataaagatccagaagaaccattttccgattctttcgttcagcttgtggccgaacattttcggataccagaaaataaatcctgcgaaacatgcaaataccgtacccgcgatcagcacatagtggaagtgagatacgaggaagtacgtattatggtattgataatccgctgcagccatcgcaagcataacccctgttaccccgccgacaacgaagttcgggatgaacgcaagcgcccacagcatcggtgttgtaaaactgatccggcctttatacatcgtaaagagccagttaaagattttaaccccggtcggaaccgaaatcgccatcgttgtaatcgagaagaaagagttaacggacgcactgttccccattgtgaagaagtggtgagtccatacaaggaaactcaggacggaaatggcgataattgagccgaccatcgctttgtaaccgaataactgctttcttgcaaacgctgaaataatttcagagaaaataccgaatgccggtaagataacgatatatacttcagggtgtccccaaatccagaacaagttagcccaaagcatcggcataccgccggcttccagcgtgaaaaagtgagcgccgaacaaacggtcaaatgataacagcgccaatgccactgtcaaaacagggaaggcgaatacgataataaccattgtaatcagcgtcgtccatgtgaacatcggcatacgcatcagcgtcatgccttttgtacgcattttcaggatcgtcaccataaagttgatacccgtcatcagcgtaccgataccggcaatctgaagaccgagcaggtagaagttctcaccaggcccgggactcatgtcgttgcttgccagcggcatgtaactcgtccatcctgcgttcggagaacctccgataacgaaagaaatattgaaaagcatcgcacctacgaagaacgtccagaaactcaggttgttcaagtaagggaatgctacgtcgcgcgcaccgatctgcaaaggtacgacaacgttgatcagaccgattaaaaacggcatcgccatgaagataatcatgatcgtaccgtgagtcgtaaagatctcattatagtggtttgagtctaaaaaactgttattaggaagcgctaactgggcgcgcatcatcaagccgtcgaccccgccgcggaacagcatgataacagcagagataatgtacatgattccaagtttcttatggtctacagacgtcagccattcagaccagagccatttccactttttgaagtatgtgagtacaacgatgatagcgatagtggaaagcgcaatggaaacttgtgcgcccagaattaatgggtcacctgttacaaaaaattcatcccatctcaatttcattcgggcttcctcctttcttgttcaatttcaatcttgtttatcgtcggatactttaaattcgtttttctttacatcttcccacgggtctgttttagagtgcggtgatacggctttgtagccaaggcgtttgcgcgcctccatcgcatattcggcatcttggccgtggtcaacgtattttaagtgtgtagaagagaacgttaattttccgacattctccggaagcatcagttcgtcatacttctctttcgtcagctttggagaatcgctttgggcttttttcacccagctgttaaagtctttttgcgtaacagcttttacgttgaatttctggtcggcaaagtgttcgccggtgaagttcgcgttgcggccttcatatgttcccactttgtcagcctgtaagtattgatccatcagcattcccgccatcgcgtatttttgtcccccaagctgaggaatccatagcgatgccattgaatctgctgaagaaattttaaataaaaccggacggtctacaggaatgttcaggtagttaaccgtctcaatatcctgctcagggtagctgaatacccatttccagtctaccgaagtagcataaacaacaagaggctctttatcctttgtcgcttcaggcgctttttctaacgaatatatcgtctgtacggtaggcacagaaagtgcaataacaattaaaattgggatcactgtccagactacttctaagaacgtgttgccgtgcatctcgggcttgtaatttccgctgtctttgcctttgcggtcgcggtatttcactaaaatgattgtaaatagtacgaatacgacgccgacaatgaacagcataaatccgattgacaagagaatcagatctttctgctggtctgctacaggtcctttcggatctaaaacggaaatgtcgctgcatccgcccagtacgaaaacaacagccaacatcgctaataaaagtaacggtttaaatgctctgaacaagaagatcaccatccttcctattgatgtagtgaatctgaaatgtactttctcaaaatcttttctctatctaccttgttatgctatcaaaatctgcccttattagctttatttttttctaaagttcatctttttttcgacctaatgtcacaaaatcgtcaaaaaatgcatgagctttttccacttgcgtaaatcaaacataaaaagttttagatcatttagcatatatagagaaaaaagatagcgagaacgaataataccaaataaaggtttaccataataaaaatcgctggtcaacaaaaagtttcattttgttaaacattctacaaaagaaatattttttcctttgctcacaccttttcacacggtttccattttaacgcaacgcattgtgaaaaaaaagaccggaacgcgccttgatatgttcattataaaaaacgcattcatatgtttaatatggacaaaacgaaggaaacatataggcataaataataaaaaataggaagtgatatttatgggttttatcgtatctctgattgtcgctattattatcggctggatcggaagtttatttgtaaaaggcagtatgcccgggggaatcatcgggtcaatgatcgccggtctgatcggcgcatggatcgggcacggactgctcggcacatgggggcctcaccttgccggctttgccatcattccggcaatcatcggagctgcgatcgtggtattcttattcagcctgatcgccagaagcagaggataaaaaaaagcctcgtcccttatgggatggggcttttttccggtagagcgcccaaatggcggataaaccgccggaaagccgctctgccttcttctgtctgtttaaagacgccggcatgctccagtatccgcgcaaaggcatggccgatttcctctttcagaatctgttccgcgttttctttcgttaccttccgcttatgcagcacactgagcgcccaatctttatgctttgccgcagaagggtctgccgttaagaccgcctccgggtccggtgagcacagcgcttcagccgtgtatttcatttcttgttcaaggcggcccggcagaatcgcaagccccattacctcaatcagtccgatattttcttttttcaggtgatgaacttcctgatggggatgaaaaattcccagcggatgctcatcagaggtgcggttatttctgaggacgagatctaattcgaataaaccgtttctccgccgggcaatcggcgtaattgtattgtgcggtgtttctcctgaacaggcgaggagatcagccgcctcatcggaataaccgcgccatgcccgcaggatggcatccgccgcgccggaaagctcagacgcgcactcactctgcaggcggatgaccgacatcggccacttcacaattcccagcaccgttttcggatagtcaggcagcctgtaccagctttctgtctccgccagcgccatcgggaattcataatggcccccctgaaaatggtcgtggcttaaaatactgccgccgacgatcggcagatcagcattggaaccgagaaaataatgaggatactggctgacgaacgacagcagccggtcaaacgtttttttgctgatcttcatcggttcgtgccggtctttcaaaacgatgcaatgctcccggtaatacacatacggagaaaattgcagaaaccactgctcatcgccgagaatgaccggaatgacacgaaggttttgacgcgccgggtgatccggtctcccctcgtacccgacattttctttacaaagaacacatcccggataatcggattgaggctgctctttggcagcggcaattgctttcggatctttttccggttttgaaaggttgatcgtgatgtccagctttccgtaagccgtctcagccgtccatccgacattccgctgtattctgtccgaacggatataatacacatcctctgaaaatcggtaaaacgcctttgtcgcctgctccggcccgtgcaccgcctttgtttcttcaaaacgacgcacaatctcggacggctgcggggcaaagcagcccatgatcttcgcgctcagcaggtcgcgataggtgtctgtatcggctgcaatccggcccgtttctgccgcccattcataaatcggggccaatatgtccggcaatgatgccgccgattcattttctttctgttctgaagcctccggatgggtaatatgcaaagtttcatataaacggtttcttgtatattcaatatcaagaaatgaaatcagctctttttgcaatccgtactggattaaacgttccacgtgccgctcaattgccatcgtcatccccctttagttctctcgctccggcgccgatatccgccgtgtaaaagtcagcttttctctctgtcttctcctcatagcggcccccgttagctctccgatgagattcactctgccgggcgcaaagaaaaagcgcaggtctcggattccccgaatacatcagcaaacgctttctttattttgcgcttcaaacgcatccccttccaccattacactttccccccgggacgcggaaagaaacggttatgacacgccctcttctttcgcttttctgaagacaatccacttgctggccgcatagttgacgactacaataatgacgttatcggcgattttcgccaatgtttcgttcatatgaaattgactgaccagaagaatcatcatggcgagatcgatggcgagagacagtacccgcacgctgaaaaaggccgttaattctttcatcagactccgcatccccgcggtcttttgctgaaagacataccgtttattcgtaacataagcaaatagaacggacagaatccaagcggcgacagtcgccgccttgtaatccatctcaaatgccgacgtcagaatgtaaaaactgacgatattcacgatggtcgtgaatatccccataatgatatacatcataatttctctgtagcgcatggcagttcctcgctttctgaaagacttttctaaaccttttgtcaaatcaagaagaacgttaccctgattttctggtgctgacaaaaacatagagcgcgtcaaacatgctgcggaaagtaaccggccttcccagcacattggattgcttaatcaccccgtcgatgagcgcgcacatcatgttagcggtatgctcggtatctatatggtcttctattaaatttctcgatttgagccaatttatgtacatggtgctttcttctatccataacttatacaggcggatataagcttcatattcactgacgactttgtaagtaggcatatgaacggcaaaagacacaacattccaggcaggcttgctgtttacaaaccgcatcaacaggctggccgcgctggccgcggcttcacaaagcgtcaacggccgctctgtttgcttttctaattcgtcgagatagccagtgatgatcctttttttaatctgacgcctctctaacaaatgcttcagaaaatcttccttgctttcaaaatgaacgtaaaacgcccctttgctgaaacccgccgctttactgatgtcatcgattgagactgaatcgtaagctctttcaatcaggagatgaaggcctgcgtcaataaaactttcaaatgtttcttctctcttaatttgaaatttgttttttttcattttttaccccagctgtttgatcattcactttatcttacaccgaatcattcttttgcggtattttttatgcaaaaagaatatgctaatcgacgttttgagggtaaatgttaataggtcatatggtttatttttatttgcatactatccagtcagtatttatttgtttattattatatgtaagaattcttgaaggattttggttatttcagtcattttcttagggaataggtaggtgaattcatcttcaatttgggattaccggccaactatgtgtgatatttgttatacattggctgctgtagctgggcaaatcaatttttcaattggaggttcttatgaaaactcatgtaatgaaagatatagatcaagattggcaattgttaattcaagaggctagaatcatgggtttgcacattgacgatgtgaggcgcttcttaaatactgaaaaagcggtgaagaaaaaaacaccaatgaaaaacaccatccgccagcggtaagattacaggcggatccttttactatatgacctgccacagtccgcccgcacccgagttttcaaaggaacacccgcaataagaggggaatcagagaacaaaccgtataccggacaaccattcccgtccgcattccgcaattgaacagccaaacatggtgatatgagatcccccgctgcatatcttgtgtattatgcccatttatgaggtgatacacagatggatacgaatccctattatgatgaaaaacaacagaactactacgaaggcctgaatccttatttattgaacaaaatagacgaaaactggcggacagtgcttgatgtcggctgcggcacgggcaatttaggagcggcgatcgaagaccgcggaataacggtttacggcattgaagcgtatcccgaagccgcaaaaaaggcggaaagcaaattgagccacgtgctttgcggcgacattgaatccgccattcttccgtacgaatcagagcaattcgactgcatgctgttcggagacgttcttgagcatcttgtcgacccgtggacagtgctgaaaaagcttcgtccttatgtaaaaaaagacggcactgtgcttgcatgcataccgaatgtcggccacatctcagtcgtgttggagcttttagccggcaaatggacttacagtgacgccggattaatggatcagacccacctgcgtttttttacccgggaagagactctttcattatttaaagccgccagctatgaggtcaaacgcattgaggcgatccgcgttgatcacccttcttaccacaaagccatcgcatcattgcacgaagtatgcgtacagcttggcataaggcatgactttatgacagaagcatcggcctatcaatatgtgattgaggccgagaggagcatgtaatggattcacattcatttctgtttgtcgtctgtgtgaatgatgagtcgctgtactcccggtgcaagagccatatcatgcagcttaccgtccccccttcatactccgttgatatcatgccgatatacgattcagcaagcatggcctcgtcctacaacaaagcgctgaaacacccctccaaatataaaatttatctgcatcaggatacttttatcattcatcagcatttccttcatgacatgcttcatatctttcaatctcatcaggagctcggccttctcggtgtcgccggctgcaaaaccctgccgccgaacggcatttggtgggaaagcggacagcggatgggaaaagtgattgaataccgggggaatgcttatcacccgctggattttgagcacggtgatgaagacggcctgtttacgcccgctgacgccattgacggcttgttaatggcggctcaatatgacgtggagtggcgggaggatttgtttcgcggctttcatttttacgacacatcacagtcgctcgaatttcaaaaacacggctatcaagtcggcgtcgcctgccagaaagacccttggtgccttcatttttgcggcgactcctttgacgccgcggcatatgaagcggacagacaaacatttgtcaaacactatatggcaaagccctctcgctgatcgagagggcttttttcgggttaacgtttattcagttcccgctcaatgatttgttcaaaggtttcctttcccgccgcgccagggattctctcatcgccgatgataaacgtcggcactgccgtaatgccggcttcctcataagcatggcggagcgcttcccgctgtacgtccttgtacgctcttgtctcaagcgcctctttgaaggcagcgccgtcaagtccggcttcttccgcaagctttgtcagcacgccaacgtcaccgatattttgttcttcctgaaagaacgcctgaaaaacgcgtgtatggtattcgcttcctttcccgtgttcctttgcgaaatgaaagccttcaaatgccaaatccgtgtatggatgcggtgacacgcgggggaacgtgatttcaacgcctaacgactgcgccatcggctcaatggagtttttccacatctgccgcttggcgggatcattcaccggatcaagtttcggcgaggggctcggacgcaattcaaacggcatccattccacctgtacgtccttgtccttgattgcttcttcaaacgccgctttgccgacatagcaaaacggacatacataatcagaatatactttaatctgcagtgtcattgtaagtctcctttccttatcattttaagttgtaacttttatagttacaagtgttttttttaaaaaaaacaccctccatatggaaggtgtcacgattccagcagcctttgggcgatatattctccttttttacagccgccgggacaggcgaataaggaagagccgatcgtttgtgtgtattcattcagcgcatcctttgccgccaaagccttcagcatcgggacaaattggcggtccgggtctttttgaaagcagataaacaacaggcctgcgtcaacatagcccgtcttcggatcaattccgtccgtataggaaaatgcccggcgcagaatctgtctgccggttgattttgccacgctgacatgcgagtcggcgggaatttgattcagcttcacgggatcggtttcctttttttgtccgaaaggcgcgcccgagcttttcacccgcccgaacgtgtcctcttgttccttcaaggatgaacggtcccatatatctaaaaacatcttaattttcctaaacgccatgtacgtgccgcccgtcatccagtccggctctcctgattgaacccaaacgatcgaattcatcaggttttcatccttcgtgctttggttgccggtgccgtctttgaatccgaagaggttgcgcggtgtttctccgttttttccgccgcttaagaaacctttattgagaaagcggacttcacacacacccgatgcctgtttcatcaggttgcgcaccgcgtgaaacgccgtttgttcattatccgcgcagacctgtatgacgatatcaccgccgccttgtttcttatcgagcttgtcgttaggcatcggcggaatatcggcgaggtgcttcggttttttatctttcagtccgaagcggtccttcccgtctttctcgaaaaacccggggccgaagccgaaggtaacggtcaaattcgccggtgccagatcctgcgactccccggtatcctgcggaggcatatatttatttttctgttcgcctgacgggacggcgcctgaagtcagcagctgcgtcaagcttgtccattgtttgaaaagggagatgacatcggctttgtcgcttgacatgacatcaagcgccgcaaaatacacatacgtctgatgcgccgttgtgattcctgcttggtgctttccgtaaaaaggaacgatttgatcacgatcacgtttttcatcattcttctttgaagcggtggccgccggtttgaagagcggcgcgagtcctccgaggccgctcgctccgacagcgacggctgcgcccgcgacggcgccccacttcaggacatcccgtctgtggatctgtttttccttgttatgttcatcgctcatgctgtgtcttaactccttttaaagcacatcggcaatcttcgacatggtttcagaaagggccgtcagcttcgtgcttatctctctgatttgatctgtacttaatgtatcacaagacgtatacattgatcgcacgttttgtatttcgacatcaaaacttcaaattcgctgaattccgcattaagtttttccgtgacctcgaaatggtctctcacttcgcgctattcactgttttatagagggcttttgagcctgcgctgattggttcaggcgtcactttgagagaagcgatagagccgtcaaacgcttcggtcgatattgcaagcttgattgctctgttcttgacatacggcttctattctcccagtccgtcacgcctttttgcgcacacagaaaaagggccgccctatcgggacagccctgctttggagcgccgaatttcctctgaaaacttccgcgccgccgcttttggatcttcggcttggctgatggcactgatcatgctgacgccgtctgcacccgcttcaatgacgggcgccgcgttgtcagccgtaatgccgccgattcctacaatcggaatggtgatgccctgacgccgtacctcttcaatcaatgtaactccctgcacggcttcagcatctttttttgtttcggtcggatagaccgggcccattccgacgtaatcggctccggcttcttccgcccgcttcacctcggagacgttatgtgctgacacaccgagaatcatatcgccgattgccgctctcgtttcttcggcgtctgcgtcatcctgtccgatatgcactccgtccgcctcaaggcgcaaggccaattcggcatcatcattaatgatgaaaggaatcccggcctgcctgcagacatcctgcacccgcttcgcgaacaggacacgttcatcccctgttaaagaaccgctccccttttcccgaaattgaaaaagcgtagcgccgccctcaattgcttttttcaccacggaaaccgggtctgcgcttgtattgtttgatcccataataaaataaaccgataacatattcttcatcatttcccgagaaatacgcgtcatttttctatcaccctttcaattgcggcaagctcagccgcttcttgttctgagatgcttgccagcttgtttaaaagctcaatctggaagctgcccggccccttatgggaggtgtccaaagcggcaagctgagcggcgcttccgtatacagaaacggctgaaacggccgcttgcagaacgtcctgccccgctgcgcagaaggctccgattacagacgtcagcaggcatcccgcccccgtcaccttcgtcagcagtttatcaccgttttgtacggcgtatgtgtcggtgccgtcggagatgacgtcggtttttccggtaatcgcaatgaccgtcttcagcccgcttgcagccgtcttagcgagctgaaccacatctcctccggcttcccccgcatccacgccttttatcttccaatcaggggcgccggcaatattggcaatttccgcggcatttccgcgaataacggacaagcggacctcctgtatgatcttgcgggctgatgccgtccgaaacggcgtggcgccggcgcctaccggatcaaaaatgaccggaacaccgttttcattggccgattttccggctgcgatcatagcttcaaccgatgccgagctgagggtgcctatgttcaggacgagcgctccggcgattttcgccatgtcggcggcctcctcaattgcataagccataacgggcgatgcgccgagcgcgagcagtccgttagcggtgaagttcgtgacgacattattggtgatactgtgaacgagcgggttttgatcccgcactttactcaagtgttgagctgcggtttgtgcgtccatgcttaatcatccttttttctctttttcggattccataaatacgatttcgtatgctccagccaggctctggcggcaaaggacatatagcggtccttccgccaaatgatggctaaatgccacggaatgaccggatgaacgagcggaatggttctgactttgtcaggatcaagaccgcgacagattctttccggcagcaggccgataccgagattggcggataccatttcgctgataaagtcccactgtgatgtttcataaatgacatgcggcctgaatccggctttcacgcattccgtcataattcgattatgaaggacaaaatcctccctgaaaaatatgaacggctcttctttcaattcatgaagactgcattctttctcgtcagcgagccgatgtgacggatggacgacaagcataagggtttccttgacgattgtgaaggtatgaaaaatctcttcattcgcgggaagcacgacgaccccgatatcaagcgagccgtcctccaccccttgctgcactttaatagagccgtcctcaacaagctgaaacgtcacatcggggtatgtgacgcggaagtcaccgagcactctcgggaaaaagccggacccgatcatcggcggaagaccgatgcggacgtgccctttcttcacttccataatatcgttcagctctgacgtcaggttttggaatgactttgtgatttcctgcgcctgcacatacatgctctgtccggcgtcagtcagttcaacttgccggccattgcggtaaaacagtttaatgccgagctccgtctccaggtttttaatcatttttgagattgtcggctgtgaaacatacagagactgtgaagccttcgtaaagcttttcaaacgggccacttccaagaaatacgttaagtgccggatatccattacatttcatcctttctatagacaaaaggaatacacattattctttatatgtattttacctatagcaaaaccttctgtacaatataaatataagggaggcatcattatgaaaaaattgctgcttaccgttattcaaatcgctctgctgtttatatttgcgcgtctgatcaattggatcacggcggctcttcatataaatattcccggcagtataatcgggattgtgattcttttcacattattgcatttcaagattatcaaacttgaatggattgagcttggcgcagcatggctcctcggtgagctgctgctgtttttcatcccgtctgccgtcggagtgattgaatacggagatattatgtctaaattcggcgtaagcattttacttgtcgtcgtcatcagcacatttgtcgtgatggtttcaacaggtacgcttacacagctgatagcaaaaagaaaggagaaaaaacaaacgtgttcatcggaatcataagtttattcttaactgtcttagtatatttgggcgcgaaaaaactctacattcgttttccgcgggtgtatacgtcgccgcttctgattacgcccgctgttttggtcgtactgctgcttcttgtcaatgtcccgtatcagacatacaatctcggcggcggactgctgaccgatatgcttcagccggcaacagtggcgttcgccatcccgctttataaatatttcccgattttaaagaaatacgccgtggaaattattttgaacgtagcggtcggttcatgtatcgccattctgtcaacagcctttatcgcaaaatggttcaatctcggcagcagcttagtcgacagtctcgtgccgcgatccgtgacgacgccgattgccatgaacgtttcagaaatgatcggcgggatgccggccgttacagcggttttcgtcattttaacggctttattgggaacgatcatcgggccgatggtcatccgctatttccgcattgataacgaaattgcccggggcgtgctgctcggaactagcgcgcacggagcgggaacatctaaagcatttgagctcagctccgtatcaggaacgatctcaagcgtgtccatgattctcgccgcgattatgacactgtgcgcggccccgattttgctttcgtttatgtcataaaagactgctccttacagagcggtctttttttagttgccatgaagaattgatttgtctgtccttcataaaaagacgaaaacacgatatgataagacatgaagtgaaaagactgaagaacggatgtgtcatatgaacggccagcagcgaagcagcatcagaaaaggacttgaagtcgatatcgtcctgaaagccgatcagcgttcaggaaagctgacaagaggaatcgtgaaggatattttgacgaactcaagcttccacccgcgcggcattaaggtccgccttgaagacgggcgaatcggccgggtgcagcacattattgaatagaaaaaagccggagcttcacgcccggcttttttttctttaatttcagcaatgaaatcctcatatgttctccctttatatacaaaaaatttttaaccaactattgactcttacgttgcgtaatactttagagtagccattaaggaggcggcaaacgtaatgggtatgaaagtaaaagaagtagctgacctgattggagtaagcatacgcactctccatcattacgatcaaattggattattgactcctcaggaaacgaccgattccggttatcggctttattctgaagagaatcttgaacagctgcagcagatactatttttcaaggagctcgatttctccttaaaagagattaaagaaatcattactaatccttcatttaaccgaagggaagcattcattttacaaaagaaaatgttgattgagaaacggaatagagtcaataagatgattgaaaccatcgataaatcaatcaaacatatgatgggagagatttgcatgacgaacaaagagcggtttgagggaattaactttaatgataatctttatgagcaagaagcccgcaaacggtggggtgatcaacctgtcgataaggtaaatattagattgaaaaacatgactgatggtgagcaaaaagatttatctgataagtggactgcaatgttcaataaatttgcactccttattaaccaatctcccgagtccccagacgtacaaacagctatcaaagagtggtttgattttctcaatgaaaattttggtgaatattcttttgatgccttttacggattaggtcaactctatattgaagatgaacgcttcactaagaacatcgaccggtatggtgaagggttggcgaagctcatgagtgatgccattacaatttatatagatactcaaaaaagggtggtgcccattaaaatcattatcgaggatacaattgggcggagggattagtgaggccactttacttggcacagatgagatactaaataatagcgggttttttctttaaacagtaagatatgaagattatttatcccgtattaaagcgatggaagagggttttcttttccccctctttccacgctataaatgatcatcctattttttccgcaagaaaacaaccttcaaatagttcccttctttaaacgccggaatcgttttgaaatcttccggaagcgtgtattcttccaaaatgtcgtaacgctcatttgtttctttaaaggcggtctctataaaacctttaaatttcttcatattgaaggcgctgctgtttgtcgaagcgacgatgatgccgttttttgcggtgatggcgatcgtttccttcagcaggtttttataatctttcgccgcgctgaacgtccgtttttttgtgcgggcgaaagaaggcggatcaaggatgatgaggtcaaacgccagcccttttttctccgcatagccgaagtatttgaaaacatccatgaccttaatgtcatgcgcctcataatcaattccgttggcgctgaactgttcaatcgtttttgcgagactgcggttggcgacatcgacgcttgtcgttttctcagctccgccaagcgccgccgcaacggaaaatgcccccgtataagagaacgtattcagcacccgtctgccgtttgcatacttgtcccgaatcgctttgcgtacatgacgctggtctaagaaaatgcccgtcatcgccccatcgtttaaatccgccgcgtaccgtatgccgttttcttgaacaatgaccggaaaatctcctctttcgcctttgacaaaatcgtcgtcttccacgtattgcccggcagtatcgaatcgtttcttttcatagatcgctttataagaaagctccagtccgtcaatcgcctcaatcatgctgtccttataagcgtaaatgcctttactgtaccattgaatcagcagataaccgtcataaaagtcaatcgtgacgccgccgatgccgtcgccctcaccgttgaaaagccggaacgccgtcgtatcgggcgcgttaaacagatgggctcttgcttcagccgcttttttcagcttgtccagaaagaaacgtccgtcgatccgttcatctctcgcgcgggacagcacccagccgactcctttattctgcaaaccgtaatagccttttccgataaactcacccttctcggatgtcacatcaaaaagatcgccctctgttaaatgagccgagcttccggacagagcgtctttttcaatcagggggaatccttttttcagctttccggcaaatgtatctttcactgtaagtagcttcattgtgcattcctctttcgttttgctttctcttatcgtaccataaaacatgatcaacaccgcattgtcccgaaaaattcaaaacagggggaaaaccatgacagccaaaagaatcgaccatacaggcattatggtcaaagatattgaaacatccatcgccttttaccaagacgttctcggtatgcagttaaaggatcgtatcactcatacgaacggcattattgaacttgcctttctcggctttcaagaagggccggagacagaaattgagctgatccagggctacagcagcgagcttcccgcagaaggaaaagtgcaccatgtcgctttattgactgaagatatcgcagcggagttcacgcatgcgaagcgtcagggcgccgtattcattgatgaagaaatcacgacacttccgaacgggtaccgctacttttacattgaaggacctgacggcgaatggatcgaatttttccagcgttaaaaaaacgggcgaaagcgcccgtttttttttatgtttcttctgtgacgttttgttccgccgcccgttcctctctccatttttgaagatcccaaattcggaaaaacggataataaatgataaatgtaatcaggagattgatcagctgcatgaccgaaccggagatttttccgcccgtcgccaaataaccggaaatcagcggcggcatcgtccacggcacggcgattcccgccggttttgccaccatccccgtgctcatcccgatgtacgtcgccgtaatggtcaagagcggcgcaacaataaaaggcacgattaacagcggattcatgacgagcggcatcccgaaaataatcggttcgttaatgttaaaaatcgcgggcccgatgccgagacggccgagctgtttcatctgtttgcttctggagcgcacaagcatggtcagcacaagggcaagcgtcgctccgcttccgccgacattaatccatatttgaaagaactgtgtcgtaaaaatgctcggcagcgcttctcccgcctgaaaagccaaacggttggcgtccatcgccccgtaccagatcggcgacatgacgccgccgattatggacgcgccgtgtatgccgcacgaccaaagcagcatttgcacgaattcggcgataagacttccgccgagactcccgcccaaaatagacagcggggtgcccagcagatcgcctacgacattgtggagacttttaaaaggagttatttcaataaacagacgggccagccatacaagcgtaataataatgaaaccggggatgagcgcaacgaacgatttgctgaccgcaggcggcactccgtcaggcatcttaatgacgatatttctttgtataataaaccggtacacttccgtagacagcattgcaatgatcatcgcgacaaacagacctttgcttccgagcagcgaaatcggtatgccgcctcccaccataatctctgttgacgagccgtcagggataaacggaatctgatacggcgtcgccaataaaaaggcggcaagggcaatggctcccgacgacagggcatccacctcatagctttccgcaagccggtaagcaatcccaaaggcggcgacaagcgccataatgtcaaaggacgcattcacgggatacccgagcttttcaacccaattttcaccgaaaagaccagccataaaatcggcataaccgggaatcggaagactcgtcagaatcagaaaaaccgatccgatgatgataagcggcatagtcaaaataatgccgtcccgcaaagctcttaagtgcctttggccggcgacttttccggcgacaggcatgattttttcttccatgacccgattgaacgtactcatttatcaaaaaccccctttttgagttcattgcgcagatgtcttaaagcattttctccatcatattttggaaacgcttacatttgcatacagaaattttccttacccctcaggaaaaaaagaattccgcactgccgatatataaagaaaaagggggaatcgcaatgtatcacaccctgaaaccgataatggccgcggccttgtgcatcagcctgttctccgccgcggcgcccgcgcacgccgagacgcatgaccgggacgttatcgtggtgtacaaaaatcaaaacggcaaggaatccgccatagacagcggagcggatgtggaacagacctatcagcatctcccggcagtcgccgtgtcagccgattcgcaaacagtgaaagacctgaaacaggaccctgacatcttatatgtagaagagaatgtatcctttcaggcagcaggcggttctgatatccgcccgttatcagctgcccaaagcagcagttacgtgctgccgcaatgggatatcgaaccgactcaggttaagcaggcgtggaaagaaggcttgacgggaaaaaaggtgaaagtggctgtcattgacagcggcatttaccctcatgatgatctctccattgccggaggctattccgcagtcagctatactccctcatacaaagatgacaacggacacgggacgcatgtcgccggaatcattgcggccaaacatgacggatacggcatcgacggcatcgcgccggatgtccggttatatgcggttaaagcattagacagaaaaggagcgggagatctcaaaagccttcttaaagcgatcgactggtcgatcgccaataaaatggacatcatcaatatgagcctcgggacaaacgcagacagcaaaagtcttcacgacgccgttgacaaagcttacaaaaaaggaatcgtgatcgttgccgccgcaggaaacgacggcaataaaaaacccgtcaattatccgggcgcctacagcagcgtaacggcagtctcagcgtcaactgaaaaaaacgggctcgcagctttttccacgaccggaaaacaaattgagtttgccgcacccggcactaatattacgagcacgtatctgaatcaaatgtacgccacagctgacggcacatctcaagccgcgccgcacgtcaccggcatgttcgcgctgctcaggcagaaatatccggaggaaacaaatacacagctccggcagcagatgcagcagaacgtcaaagatctgggcgctcccggacgtgacagccgattcggctacggactggcgcaatatcacacaaaacaaaagagctttgccgaacgggccgtaataaaagcggaaaagacgaaaaagcaggcagatatcgatgaagcaaaaacggcagtcagcaaactgtccaagtcaaaaggaaaaaccgctctcgaggcgcggatcaataaagttcagacggcaagaaatgtgacggacgcaagagacaaagtccggactgccgaaaaacaaaagaaaaaaaccgccgtcaatgccgcacaaagcgccatccgcaaattaccggccggttcagagaaaaaagggctgcaaaagcggctgaacgctgtcaactcaagccttttgagaactgctgaggccagcgtcaagcaggcggaaaaaaagacttctgaggccaacaccgcaaaagcccaaaaagcagtcagcgaaatccagccgggaaaagaaaaaaccgttctggaaaaacggcttggctggataaaagataaactcaaccggcagcaggcaagggacaaagtaaaaacggcggaaaaaaccaagacgaaaaaagcaaaatcagcggcgcaaacggcagtcagccgattgaagccgtctgccgaaaagaccagcctgcaaaaacgcgtgcgtgcgattcgggtgaaataataaaaaaaacgcttgtgagccggtcaacggcttcacaagcgttttcatcacacctgcctattggttcatggccgggcggtcaatcgtgttccatttcgtaaaggacatatatcggaaataatgatcacgatacgggtgcgaggtgcctgtattccaaggcttgtccccgccgcagaaatggacgatggccggttcggcacgtgtttctctgtaacgtatacggtcgatcagttcaggaggcgttttctcattcatgataatatgcgtctgcgcgttccagcgcggatgcagttcatgccattgatcatataagatcgcgttaagcgcgtcctgatcatgaaacacgagaaaatcctccgagctgttatcattgataaaatcaatcacttttttggaaatattctgttttctccaaggttcgaaatctataatcataataccggaattaaaatacttggcagtgtcgctgatattcatttttttcagtctttcatgctgtccggcatcttctaccgccgcaactattgccggggaaatatccaagtcccataaaaccgaaatatcttccatcacaattgcatcgcaatcgatgtaaatcatccgctttacggactcatccttaattaaatcagggatagaaatgcggtaataagccgcttttgtaatatggctgctttcgactgcatgcttgtattgatcagcgtctacttctaaaaattcaagcggcgtcccgaatgacatcgcagtctgttcaagcttgtccttgttttcggcagtaattccgccgtcgatcacatataatttggcattccttgttttatccatattcatcaataaagaagcgaacatcccacccaaatgacgagcataattatcatcggcacatgatacgatatgcattgtttcattctttcccactgatattcatctccctttttgttgtacaaatgtctttccctttttttaaaaagtaaacctcaatcttacacattttttctgcgggaatgtgctgtttgcgatttgatatctttcgcattctctgttaaaattcatttcatagctaatgattctgacaataataaggagcatgacgccattgacgattcgcaacgatgccggatcagacaataagaagccgaacaggcctttttccgatctatccggccgaaacaaagaggcggcctatattgcagctgcactctatcggtccgcccagcagctccgtgtaaaaatggagaaagaggtgctgtcggcacacaaattatcatggacggcgttttccatcctgtatgacctttgtgaatgggaaacgcttgatacaagaaggatagccgctctatccggaattacctcggcgacggcgagcaatgtcctgaacactttggaaaagaagggcttatgcagcagacaaacgaacaaaagagaccgcaggcttgtattcgtcagtattaccgatgagggcagaaaggttattgaagatctgtaccccgactttcatcagggggaaattgaactgacggcctgtctggataaacaggaacaaaaaacgctgtccgccctgctgcaaaaaatcgctgacaatttcataacatagcagctatgacgggaatcagtaacggattgtctccctgtttcagagagccggcggatggtgcaagccggcacaaagacaaacgtgaattacctccctgagctttctttgtgaacttcagtagcaaagaacgggaaaccgttattcgaatgagcggaagacgtcgtttcgtcttcaatcagggtggtaccgcgtgcatacagccacgtccctttttgggatgcggcttttttgtttggctaaaaaaaggaggatgtaaaagatggaatcaatcactttaacgaatgatcaggaaaaagaagtgcaaaggcagctggatttgtacatgaccggcgccgcggacgtcataccgcctgaagaattgagaaataaaatcgccaaatcagtggcatccggcaagccgctgaacattaaactcggccttgatccgtccgcacccgacgtccacttgggccataccgtcgtgttaaacaaactgcgccaatttcaagaaaacggccatatcatacagcttgttatcggggactttaccggaaaaatcggtgatccgacggggaagtcgcaagccagaaaacagctgactgatgaagaagtccaacacaatgccaaaacctattttgaacagtttggcaaggtgctggatcaagacaaagttgaacttcactgcaactcaaaatggctgaagacattgaatctggaagatgtgattgaattagcggggaaaattactgtcgcccgcctgatggagcgcgacgactttgaggagcgcatcgccatgcaaaaaccgatctcacttcacgaattcttttacccgctgatgcagggttacgattctgtcgttctcgaaagcgatatcgaactcggcggtacggaccagcattttaacgtgctgatgggccgccatttccaagaacgctacaaaaaagaaaagcaggtcgtcatcctcatgccgcttttggaaggtcttgacggcgttgaaaaaatgtctaaatcaaaaaacaactatatcggcattgacgagcatccgaacgacatgtacggcaaaacgatgtcattgccggacagcctgatgaaaacatatatccatttagcgacagacttagagcctgcggagaaaaaacagatggagaaggatttggaatcaggaaagcttcatccgagagatgccaaaatgatcttagcgggtacaatcgtcagaatgtaccacggcacgaaagcggcggatgcggcagagcggcatttcaaacgtgtcttccagcaaaacagcctgcctgaagatatgaaaaccgtcatatgggacggagaaaagaccgtgccccttattgagctgcttgtcacgcttggactcttttcttcaaaaagcgaagcacgccgtatgattcaaaacggcggaatcaaagtgaacggggagaaaacggatgcccttcataccgtcattaccgcagaagacggcatgacgattcaggtgggcaggcgaaaatttgtacagctgcgcataaacggataaacaaccagccggactgcgtataatagcggtccggctggttgtgacgggtcaatcgtttaatcgacttctttcttaatcccaagcatcttttcgtctaaataatgggcgatgtccgccgcttccttcagctcgtcggtcagatgctttgggacttcgttatttaatttgtaataaattttgtgttcaaggctcgcccaaaaatccatggcgatggtgcggatttgaatttccgccttcacatattccacacgattcgtcaaataaacgggaatttcaataatcaaatgcaggctgcggtagccgttcggcttcggatgtttgatataatccttcacctttacgatcttcaggtccttatgctgcttcagaacctcagcgacattataaatatcggaaataaaggaacagataatcctgacacccgcgatatcatgaatatgctctttcatttcctgcgtcgtcacatcgcagcctttgcgcatcagtttattgacgatgctttcaaaacttttcacgcgtgattttgtatgctcgatcgggttatgcccgtgaatcagattatattcctggctgatgatagaaaacttcgtatccagctcatctaaagcgaatttataaactaataattcatttttccaatcttccatgaccgtttttaaatcatccatatgggctgttgacaagtccatttttttcatctccttgctttgctgtccatatatgagacgggtcagtccgcggtcaggttctttacaatatcgtgaagattatgtcataaaaaaaagcaaatgccggttatagcatttgccctttcatttgatcagcggaaataactgatcaggagtccgattgaaagcaggaatccgaagaatgtattggtttgcgccgttgatttcatcgcaataatcatgttcatcggcatttcgtttttcacaaagcctttcacggcctgaacgggtttcggcacgctcaaaaagaccaggaacagccacgggcttgtgtaacccatgatgacaagaccgacgatccagatgtaagcgatggcaaaagatgccgccagtatcataacggcccctctatgccccatcaaaatggccagcgttttacgtccgccttttttatcttcctcaatatcacgaatattgttggacaggttaatcgctccgaccaggatggcgatcgggatggaaatcaaaatgctctgttcattaattctgcctgtctgaatgaaaaaagaaataaggacaaatacagagcccatgcaaatgccggagaacagttccccgaacggtgtatacgcaatcggcagcgggccgcccgtatacagatagccgatcagcatgccggcaaggccgatagccgcaagccaccagctgctgctcatgcagatataaacaccgagcacgagagcaatcgcataagagccgagcgccagctgcagaattgttttcggcttcatgccgtggcggacgatcgctccgccgataccgacggaatcctccgtatctaaaccgcgtttaaaatcgtaatattcattgaataagttcgtggcgatctggatccaaaggcaggaaaacagcatggccaaaaacagcaggaaatcaacctttacgtaaaacatcgccaatacggtgccgagaagtacgggcacaaacgatgccgtcaatgtatgagggcgggttagctgccacaaaatgcggcccatgctttctttctcgggcgtcttttggctgccccccatattgttttgattcattttcctcttcctttctattaaaaggctttcacagtcagccgataacagtagtgttgaattggggttttcacgttttctgctaccttatctatcataataatttcttcctcatttcacaagatgcggcgctttatcagctatcctgccggaaacggcttttcgcccttctcccttggggttcggcacaagcctgcttaagaaaaagccgccaaaatttttttacctcgtttatatttacgataagttaaaaatcccgcctgaacagcgcctttttagtatgatcatttgccaatttatacatgcgtgttttccatccttttgtttctcattcatttttaaggaaattttaagcttaggatattagacatattttgaaactttttgttaatctaatcgtcatatactggtgtaattattgaatacgcggggaaggaattttgaatatgatgcaaaaattaaaacgtgcttatgaaaatacattgatcaaatggacgtttcatacgggcttttattttctgatattagtattgctcttttggatgtatggatttcatacagcgaataccggcacttatatttacaacgatttctaatcggggaggataactatgaaactacttgatgctataaaaacatacgcagacgccaagccgcaggccgaagcgtttcgttccttagatcattccctcacttacggggaattatgggatttgtcggagcgggttgcgtccggcattcaaaaacatacagctgacggttcgaaagcgcctgtcctggtttacggacatatggagccgaatatgattgtttctttcttgggaagcgtcaaagcgggccgcccttacatccctgtcgatgtttccattccggcggagcggatcgtcaaaatcattgaaagctcaggcgcagagctgcttatcagcgtatcgggcgatgcagtcgatacgggaagcaatctgattaaaaccgttacgcccgaagagcttgcagctgacggagatgcagacctcagccgtgagaactgggtaaaagagctggatacgttttacattatttacacgtccggcagcacgggaaatccgaagggcgtgcagatatcggctgataacctgcaaagcttcactgactggatctgcagggattttcctgtgggcggggtaagacattcttaaaccaagctccgttttcttttgatttatctgtcatggacattttcccgtcgcttcaaacgggaggtacgctgcactgcgtaacgaaagacaaaatcaataaaccgaaagtactatttgaagagctggagaaatccaaactgaacgtctggacatcgacgccgtctttcgtccaaatgtgtctgatggaccccggctttacgcaggagctcctgcctgaggcagaagtatttatgttttgcggagaagcgcttccggctgccgtggcacaggaactgttaaaccgttttccgaaggcccgcgtattcaatacatacggcccgactgaaacaacggttgccgtcacctccgttgaaattacgcagcagattatcgatgaaaatgaatctctgcccgtcggttttgcaaaacccgatatgaatatcttcatcatggatgaaaacgggaataagcttccggacggagaaaaaggggaaatcatcatcgccgggccgagcgtgagcaaaggctatctcggtgaaccgtctctgacggaaaaagcgtttttctcaattgacggccagtgggcatatcacacgggtgatgccggttatgttcaggatggtcagattttctgccaaggacgccttgatttccagattaagcttcacggctaccgcatggagctggaggaaatcgaagtacatgtaaggcagtctcaatatgtgcagacggcggttgtcatcccgtatcagcctaacggaccagtcgaatatttaattgccgccatcgtgcctgaaaaacatgattttgaaaaagaattccagctgacaagcgccattaaaaaagaactggccgcttcgcttccggcctacatgattccgagaaaattcatttatcaggatcacattcaaatgactgcgaacggaaaaatcgaccgtaaacgcattggcgaagaggttcttgtatgacgccttacagctcgtttttcttctttatcttacttggaatccttcttttgccgacgattattttagggctgaacggcaagagattccaaggatacaacatgtttatatccatcatcgtattggctttgattttcgcgcatgatctgcacggcgtgatcgcactatgtatctttacgctgtggcaggtgcttttaatcaggggttatctcgcttacagactgaaagccaacagcggctttgtcttcagtatggccgtgatcgcgtccattttacccctgtttttatctaaattatggccgtttttcttcccgccggcgcctcatcatccggttcataacctgatcagtttcttaggaatttcttatttgacatttaaaggcgtccagctgatcatggaaacgagagacggactgattaaagaaaaaatgccgcttcaccgccttttgtactttattatgtttttcccgaccatttcttccggtccgatcgacagataccgcagatttgccaaggacgaacagaaagtatggacaaagggagaatacgctgatttactgtataccggcattcataaaatttttatcggtttcttgtacaaattcattatcggatatgcgattaacacgtatttcattatgaatctgcctcatatcacccacagtaaactgtggggtaatgtgctgtacatgtacggatacagcttgtacctgttttttgattttgcgggttacacgatgtttgccgtcggtgtaagctatatcatgggtatcaaatctccggaaaactttaataagccgtttatcagcaaaaacattaaagacttctggaaccgctggcacatgtccttatccttctggttcagagactacgtatttatgcgctttgtattctggatgacaaagaaaaaatggataaagaaccggatggccgtctcgaacatcgggtatttcctgctgttcatgctgatgggcgtctggcacggactcgccctgcaatatattatatacggcctttaccacgccgtattaatgaccgggtataacttttttgagaaatggaataagaaatacaagtggctgcccgccaatcgttttacggcctttttagccatcgtcatcacattccatttcgtatgtttcggattttatattttctcaggaaaaccatttcatcactaaaggagattgaaaacacatggaatttaaacaggaagtattagacgtattagctgaagtttgtcaggaggacgctgtgaaagaaaatcctgatattgaaatctttgaagaaggactgcttgattctttcggaactgtagaactgcttgtcgccatcgaaaaccgcttcggcattacagtgccgatcactgaatttgaccgtgacgagtggaatacgccaaacaacattgtaaacaaactgactgagttgaagtaaatgaaaaagcgtttctttggaccaattattttagcgtttgtcctgtttgtcggagctatcgcagttccggcttcatggcttacgcgcttcattcctgaaaaacgtgtcgaagagtcggcagcggccttaaatccgaatatgttccagggcctctatctgcaaaacaaaatgttcgaagactcgaagtatatgccgattttcggttcttccgagctttcaagactggatgagtttcacccgtccaactatttccaagtgaacaaccaaggctttacgccttatcttgtcggaaaaggcggggaccaatccttgatacacgccgtgaactttgcggcgcattatcagcagctgaagggcaaaaagctggtattcattgtttctccgcaatggtttatcaaaaaaggttctgatgaacagcactttgcgccgaatttttcatcacttcaggcattggatttagcatttaataaccagattgatcccgcggtcaaaaagaacatgatgaagcgcatgctccgttttaaagttgttcagcatgatgccgtcctttctgaattatacaagggaatggtcaacggacaatcatggaaagtgaaagcggtcatgccggctgccaaagcttattattctctgcttgagaaaaaagatctttattattcaatgggagaaaccaagggccctgaacggacgatctctgaaaacctgaaagggaaatcgtggtcagagttaaaaacagccgccgctcaattaggagaacggagctccaagtccaatcctttctatatcgatgacgcttcttataaaaagattaagaagaaagtaaagagagtgaaaggaatcaacaaaggaagaacgtacgccaaatcagtcgaatatcacgactttgaggatatgctggacattctgaaagatgccggcgctgaaccgatgttcgtagttattccggtcaacggaaaatggtatgactacaccggcttcccgaaaaaaggccggactgattactacaaaaaagtcactaagcaaattaaagcgaagggctttcaggttgccgacttatccgggcacgaatatgatccgtactttatgaaagacaccatccatatcgcctggaagggctgggtgtacgtcgataaagcaatggagcagttttacaaaaccggcaaggtgacggttcactgagcacgatgattacagaatatgtaaaaacgaacacgcagggggcattctctcccctgctttttatgtgatttgattttttcacaaatttgaggaaaactattgcgaatatttgttgaaggtatacaatagaatataaattattttcaaataagtttgacaataacaccaatagggagacagaacattatgaaacaagacattcgtgttgaattgacttcagccaaaaaaccgaaaccggacccccataaccttgcgttcggcagaattttcaccgaccatatgtttgttatggattacgacgccgatcaaggatggtatgatccgagaattatcccttatcagtccatctcaatggatcctgcggccatggtttatcattacggccaaaccgtttttgaagggcttaaagcgtatgtaacgaaggatcaggaagtgcttctgttcagaccggagaaaaatatggagcgcctgaaccagtcaaatgaccgcctttgcatcccgctcattgatgaagagcttgttcttgaaggcctgaaacagctcgtagccatcgaccaagactggattccgaaagcggaaggcacttccctttatatccgtccgtttattattgcgaccgagcctttcctcggtgtagcggcatcccatacgtacaagctgtttatcatcctttccccggtcggctcttattacaaagaaggcattaaaccggtaaaaatcgccgtggaaaacgaattcgtgcgcgccgtcaaaggcggcaccggaaacgcgaaaaccgccggcaactacgcatcaagcctgaaagcgcagcaggttgcggaagagaagggattttcccaggttttatggcttgacggcattgagaagaaatacatcgaagaagtcggcagcatgaacatcttcttcaaaatcagcggcgaaatcgtgacgccggagctgaacggaagcattcttgaagggattacgagaaattccgtcatcacccttctcaaacattggggactgactgtgtctgagcggaagatttcgatcgatgaaatcatccaggcgcatcgtgacggccgattggaagaaacattcggaaccggtacggcggcggtcatttctccggtcggcgaactgatctggaatgatgaaagtcttgtcatcggcagcggtgaaaccggagagatctcgaagaaattgtatgataccattacaggcattcaaaaaggcgcggaagccgacgtgttcggctggacggcgaaagtcgcctcactaagcgaatcaaaataagcaaaaaacccggaagcgaatccgggtttttttactgctcttatgcttcaatcgacttaaagaaatggggcagatgttctttgtgggcctcaagcatttcatccagaatggcctttgccacggagtctgacgggacaagagggttgatcgtcatcgcaagaagcgccgtttgataatctcccgtgacggctgcttcagcggcgacgcgctcaaatgatttgatttgctggacgagtccgcggacagacaccggcagatcaccgacggcgatcggtttcggaccgtctttcgtcatgacgcagttcacttcgaccgctgagtcattcggaatgctggcgatcgcgccgttgtttatcgtattgacgggctggatatcatgtttgtcgttatagatggagctgatcaggttgcaggccgcgtcactgtagtacgctccgccccgtttttccagctgcggcggtttgatggcgagattcggatctttgtacagttcgaacagttctttctcaaccttctgcacgacctcggcgcgtgtgccctccgtctgtgaagcttctatttcatgctcgagcatttctttcgttttgaaataatagcggtggtagccgcaaggaatcagatcgagcgccttcaggaattcaggctcccattccgctccggaaatgtttttcatcgtcatggcgttttccgggtctcccatcgcttcgatgacttgatccttcacgctgacgccgtctaagaaaacatctaacccgaagaccatgtgattcagtccggcaaattgcacttcgatccggctgacatccacatccaatgcttttgcgacgcccattttaatgccgatcggcacattgcagaggccgacgacttttgtgagattcgagtagcggagcaaggcctcggtaaccatgccggcagggtttgtgaaattcacaagccacgcattcggacaaagctcttcgatgtctttcgcgatttccagaataaccgggatggtgcgcagccctttgaataaaccgcccggaccgtttgtctcctggccgattacgccgtattttaacggaatccgttcgtctttggcgcgggcctcaaggagaccgacgcggaattgagtcgttacgaaatccgcatccttcaaggcttctctccggtcaagcgtcaggtgaatctctatcggaacacccgctttttcgaccatgcgttttgcaagcgtgccgacgatattgagttttttctcgccttcgggaatgtcgacgagccataattctctgacaggcagttcctcatagcgcttaatgatgccttccacaagctccggtgtatagcttgaacctccgccgatcgttacaattttaattctttttgtcatatttttgctcccccttgcagactcactttttcgtaaatctcgactaactcagcggccaagtctttcacggtcatggcattcattaaatgatcctgcgcatgcaccattaaaagcgtcatgtctgttttttctccgccggcttcattttggatcaattctgtctggtaatgatgggcttcggtcagttcccttgcggcttcctgaagcttttcctcggccatggctctgtccccctgctttgcggcggcaatggcttccattgatgcgcttctgccgttgccgccatgcaggatgatctgaaaaatggtctgttccattttttcattcatgtgtttcactccctttctctacagcacggctttttcgtctccctgtacggctggcgcctgcgattgttcaagttcgttttcttctttcagcttttgcgaatcccacattctgaagaacggatagtacacgataaaggctgtgatgatattaatcgcctgcatgacagcccctgatatttttccgcccgtggcaagatagccggagaaaatcggcggcatcgtccatgggacggcaatgccggcaggtttggcgacgaggcctgtgctcatgccgatataggtaaagaccagtgtgacaagcggtgtgatgatgaacggaatgagaagcatcgggttcatgacgatcggcattccgaaaataatcggctcattaatattaaagacagccggcccgatggcgagtttcccaagctgcttcatctgcttgcttcgcgaacggagaaacatggtgaccacgagcgccagtgtcgcgccgcttccgccgatgttgatccagatttcaaagaactgctgggtgaaaatattcggcagcgcatcgcctgcctgaaacgcaacacggttggcatccatcgctccgaaccagatcggcgccatgacgccgccgacaatgttcgccccatgtaatccgcacgcccacaaaagcatttgaaccgcttcggctaccaggcttccgccgagacttcccccaagaatcgagagcggcgtccccagtacaacgcttacaatgttatgaaggctttcaaacggcgtcgcttcgacaattaaacgcgcaccccagatcagaaagatgacggcaaagccgggaattaaagcgacaaatgatttgctgaccgccggaggcacgccgtccggcattttgaagacgaaattccgctggatgatcaggcggtaaatttccgtcgacagcatggcgatgatcatcgcgacaaacagccctttgcttcccatgagagacagcgggatgccgccgcccaccatgatttcctcttttgcgccggaaggcagaaacggaactttgtacggcgttgccaagagaaacgccgccaaagatatcgcaccggccgataatgcgtccaccccgtatttttcagccaggcggtaggcgattccgaaagcggcgacaaggcccatgatttcaaaggtcgcatcaaccggatattgcagtttttgagaccaggcgcttccgaacgtcttcgccatgaaatccgcatatcccggaatcggcaggttgccgatgatcagaaaaaatgaaccgatgatgataagcggcatggtgaggatgattccgtcacgcagtgcttgcagatgccgctgggaggcaatttttccggcaatgggcatgactttctcttctaaaaactggttcaccttattcacacggcccgcccctttctacgatgcgtttccgagctgttccgctgatttcagaacctccgctccgttgcaagtgccgtaatggacggtattgatgacttcaaccggcactccttttgattcacccaattttttcagctgcggaagcaaataacggacttgaggcccaagcagcaatacgtccgctttatcaatatgctggttgactgaatcgcctgacaccgcccagattttatattcttttccttgttcctgcgcgcttttttccatcttggtgacgagtaagcttgttgacatccctgctgcacaaacgagtaatatattcatgtaaaagacctcctgaaagtttgatattttgtatgtctcgatgttagtaacatcatattatgaaatcgctttcataactactcaggctttttccgctgctaacggaaaaaaggtgtatcccggtctttctctgatcgtttgtctctgaatactcgtaaaacctcctgataggttgtgcattttaagagacggcttaccgcggccggatcatccaacatgccgccgagccatttgtacatatgctggaggtcggctttgctttctttctcgacgcagagcaggcagacaaattggacacgcttatccgcccagtcaatcggcttcttcagcgtgcataccgcccaaaacgtcgtgtctgtctgcggaacgagcgggtgcggaatcgccgtaagattgccgaaactcgtaggagaaatcgcttccctttcaaaaatagaatcggtcagagaatcagaagcgaggccggcttctgcaacctgctgtccgagaaaacggatgacgtcctccttcgtctccagatcctgctgcaaaaataccagctccggtttcagaaagttcaattgttcccgattttcttccagcatggcgtcgatttttgtaaaatccccgccgcccagcagcgtatgaaccttcaatacgggaacgggcaggtcttttttgatcggcactgtgctgaccacaaaatcaatcgactcaaaggaaagctggtcaaggctgcagtaatcagccgttccgacgatttcaagacgttttgcgaaccgggaacggagcttttctcttaaaagctgcgcgctgccggcgccggacgcacagacaatcagacagcgtttaggcggccgttccgtctttctcctttcaatagcggctccgaaatgaagcgccaaatacccgatctcattttcatgaatatcaatgccggtttgctccttgatcacgattcccgcaatcactcccgcttcaaatgcgagcggataattctcctttatggcggagagcatcgggtttctcaggttcattccgtaccggtttcggttaatcgccggcttgatatggagcgcaagacccgctttcagctcattgtcgtccgtgattccgagcttcagctcccgctcaatggcttcaatcatggcctccgtcaaacggctggtttccccgtctatcagccttgtaagctcttttccttccatttgtgactgggtcatgcgctttgtcccgagcaggtgaatggcgatataggcggtttcctgttcgggaaaggtgaccgaaagcgcagattcaagctcttttacgatggcttccgctgactgatattctgtttcgagcttaatatcatgaagatcttccggaatgagagatacatagttttctgtccggattcgtttgcaggcaatggcgatatggatgatgagattgttcaggccgaagaaagaaagcgggatcttatggtttcgaacctgcttcataatggctgtgcggatcacatgaatgtcgtctttcggcagaataccggccttttcactcaggagatcaggctcgggctcgcggtcgtccactaagtattccgccatacaataacggaggcggagctcttcgccgcgcagcttaaagccgtagttcggccttgtttccaaaatgatgtcataggggcggagccgttttttgacttcttttaaatcagattgaagtgtggatttactgatgaacagttcttccgccaagtcatccagcttgaggtagccgtcggccagaagcattcttttcatcaggtaatctatccgttcatcgggaaaaatcggtacggtgctgttctgctggaaattgtcctgaagccagtttttaaacggctgctcattccggatcagcagcttatagccgctccctctgacagattgaatggatgcgccgtgtttttctacaatggtttgcagttcctttatgtcattgcggaccgtccgcgtcgttacctttacatttgcagcgatgactgagcttgtaaccggtgtttcagcagctaaaagcaagcgcagaagttcacgaagccgcccatgaagcatgagaaaaacctcctatcagatcagatgcagatgtgaaaaatgggcaaaaagaatgaggaaggggtaaatgtatgtaaattctatactggggaggatttcaagtcaatgcggcaatccgatgccaagaccgtaaaaaaacagccggatcagccggctgttcgggatgcggacatgcggttccgcttagatgccttccgttcttttatgatttttctgataatcggatagatgacgggcgcccatttgataatcgttttgaaaaattttttcaatgtctgaatcccctttcttttaccttgtctttcccctgttatcagcgtttataaacatggtcagcgtgagacataccggttccccgtcacccaatagcgccacggataatcccgggcttctccgctgttgtcaatcccgattctcgggcctgttgatatatgttcaggcgtaaagccctccgtaatatacagcggcggttccgtgatcatgccgccgtagtcgttcattgaaatgcccatcgccttcgtcagttttcccgggccgtttgtccactctctcggggtctgcccggtctcctgctctccatcaggaactgtccttcatgaggctccgccgccctgattaacacggcctgcggaatgccgatgtccgaggcgacgacgttcattaatgtatgagtgtgcatgacgtatgtataaatgcggcccgcctcatggaacataatttccgtccgtttcgtgcgccggttgccgaaactgtgcgccgcccggtcatccgctcccatataagcttccgtttccacgatataacctgaagccgttccctcatccgtctccttcacaaggagacagccgagcaataaaggggcaagctccactgacggtctctggtaaaattcaatcggcaaaggctttccttctcccgccatttgcctccctcctttctgaatatagcgatttcctctttcacgtttttcacttcttttttacaatataaacatgaaagaaaaaagggcatcattgttgaacactctattgcgttttgaaaatcggcccggtataatatgatggttcaaatgaaaatgattctcatattcaataaatgccggacaatgatcataaaagtaggtgaattgatttttgagcgattctgtcacgtccgcaagccgtctgatcagcatcttaaaaaacggggttttcttcctgatcgcggtgatcgggctgcttgtttctatttttttcgccgtctcattcggcgcgaaagacattactttacatacggtttggtcggctgttgctgattacaatccgaacataacgggccagcagatcattcatgaattgcgtcttccgagagtgctcggcgcggccgttacaggagccgcttttgccgcagccggcgccctcatgcagggtgtcacgagaaatccgcttgccgattcgggtgtcttaggcgtaaacgcgggcgccatgtttgttgttgcgctcagctttgcttttttccctcatttgtcatacgccctgctgatgatgatgtcatttttgggagcactggcaagcaccggcttgattttctttatcagtgcggcgggaaaaggcagcatgacacctttaaaggtgacgcttgccggggcggtcgtggccgcgcttttacattcactcagtaccggtgtagcgatttattacgatttaagccaggatttggccttctggtacgccggcggggtgtcggggatcaagtgggctcatttacaagtccttgttcccgtgattgcggtcttcatcattctcgcgacattcatgggccggtccgtcacccttctctcaatgggaaatgacgtggcggcgaatttaggggtgaacacggctctgacgcgtgccgcgggattaatgatcgccgtcgttcttgccggtgtgtctgtttccgctgccggcgcgatcggctttgtcgggctggtcattcctcatatcgcccgcaagatcgtcggcgttacgtacaggctgattattccgatgtccgcgttgctcggcgcgattcttttgattttggccgacttggcctcacgcacggtcagtcccccgagagaattggcgataggcatcatggtggcacttgtcggtgtccctttctttctttatattgcccgcaaggaagggagagacttataaatgaaagtgcagaaagaaacaaaaaaagcggcggcggcaggtctcgttctgctggtcatcgccgtttgcattattctgatcgggctgcacacgggctcattccggctttctcccctcaccgtgggaaaaacgctgttcggttacggcacgtttcaaagcacaaccgttttattcgattaccggctcccccggatactggtgacgatgctggccggtatcggcttaggcgtgtcaggcgctattttgcagggtgtatcccgaaatccgcttgccgatccgggcattctcggactgcatgccggcgcttccttcggtttgatgatgtatatcacattctttcattccctggaggcgcaggcgtcgatgttcatcccgctgtttacgtttgcgggcggaacactcgccgccctgctgatcgtagtgcttacgtacgacaggctgaacggttttttaacgatccgcatgctgttggtcgggatcgccgtttccgcgggcttcagcgccgttacattgtttatgtcgctgcgcctgaatgaagaaacttataccttcgcttcccgctggctggtgggaaacgtctggggcagagattggattcacgtgtggtcgcttttgccctggatcggcattctcgcaccgcttgcatggcttaacgcccggtctttgaatattttaatgctcggtgaccaggcagcggcggggctcggcgcacacgtgcagagaaaaaggatcatgctgatcgccatagcggtcggcttgtcctgcgcgagcgtcgcgatggccggcggaatcggctttatcggctttgccgcccctcacttggcaagacggctcgtcggcaccatgcatcagcatattattccgattgctggattaatcggccttgtcattcttgtcgcggcagacaccatcggccggtctttgtttcagccgaacgccattccggccggcgtggttgcggcagccatcggcgcgccgtattttctctatctcgtcatgaaaatcaaatcataaaacaaggagtattcccatgaaaaaaataattgcgctcatcagtttcatgtgtattttcttactggctgcctgccaatccgattcatcacagccggagtcaaaaaagaaatccggcgatcataaaatcgcttcgatgtccattcacctgacaaatgatctgctggctctcggcgttacacctgccggttccgtcgtgggcggagaattaaaagattttctccctcatgtgaaaaatcagctgaaagacacgaaaaaactcggacctgcctcagacccggatatggaagctttacttgagctgaatccagacaacatttatcttgataaagaatttgcgggaaaagatgtgtctaaatacaagaaaatcggaaacacacacgttttcgaccttgataaaggcacatggcgtgatcatttaaaagacatcggaaaaatcgtcaaccgtgaaaaagaagcgaaaacatttattcaagattacgaagatgaaacaaaacaagtcagatccatgatgaataaggaattagggaaaaacgccaaagtcatggcgatccgcgtgaacgcaaaagagcttcgcgtcttcagcacacgccgcccgatgggaccgattctgtttgacgatctgaagctgaaaccggctgacggcattaaagaaatgaatacctcccgcccttatgaagtcatttctcaagaagtgctgcctgattacaacgcagatgcgattttcgtggtcgttaacagagacgacaagtcacagcaagcctataaagaattgcaaaaaagcgctgtctggaaagggcttaaggccgtgaaagcaaaccatgtctataaaattgccgatcagccttggcttgattattcggcactgggaaataaattagcaatggatgaagcgaaaaaactgttccaaaaataaacatgagccggttttgcaaaaagtgcaagaccggctttttttatattgccgtttacttatataaatgtctgcttatataatagtgtaaaaaaggagtgagcgcatggaacggcggcataatgctttaagttccgaagggatcagccagtgcctcaaacttctaagcgacccgacgaggcttttgatgctgaagcttctggaggataaggaatattgtgtctgcgagctgacggctatttttcatataagtcagcccggcatcagccagcacttacggaaattaaagaacgccggccttgtgcgcgaaagacgcgagggccagtggcggtactatgccattcatccgtccggaccggaatacgcgctggtttgctcgattctgcagcagatagatgaaaaggacgaagttttacagacattgcggcaaaaagaagtcactgttacatgccggtaagggggatatattcttgggagttgcggttttatcagcgctgatttttgtgctgacacttgtgtttgtcatatggcagccgaaacatatatcaatcggctggtctgcctgcggcggagcggtcctcgctttgatcgccggagcagtcagcctgcacgatatcgcggaagtgacggggatcgtctggaatgcgacactcgcctttatcgccattattatcatttcattaattcttgacagtatcggtttttttgagtgggccgcgctgcatatggccatggcggccaaaggcagcgggctgcggatgtttctctatgtgtcggtcttaggggctgttgtctccgccctgtttgccaatgacggagcggcgctcattttgacgccgatcgtactggcgatggtgcgggctttgaatttacctgaaaagctggtttttccgtttattatcgccgggggattcatcgccgacaccacctcgcttccgctcgttgtaagcaatttggtcaatattgtatccgctgattactttcatatcgggtacattgaatatgcaacacgcatgctggtgcccaaccttttttctctggcggcaagcattttggtgctgtatctctatttcagaaaaaacattccgaaacggtatgacaccggtcttgtgaaacatccggcatccgcgattaaggatgaacgccttttccggttatcgtgggctgtgctggccgttttattgatcggatatttcgtcagcgaactgctgtcgatacccgtttccttcgttgccggctccatcgcggtcatttttctcattctggcgcagcgaagccccgccgtccctgcgaaacaagtcatcaaggacgccccgtgggccatcgtgtttttttctgtcggcatgtatgttgtcgtgtacggcttgcggaatgccggactgacggatcttctttctcagcttattcagaaagcggcggatcacggattgtttgcgggcacactcggaatgggttttatcgctgcgatcctctcctccgttatgaataacctgccgacggtgatgattgacgccatagccatcaacggaacggacactcacgggctgctgagagaagcattgatttacgcgaatgttatcggttctgacctcgggccgaaaatcacgccgatcgggtcgctggcgacattgttatggctccacgtgctgagccggaaaaacgtgaaaatttcctggggaatgtatttcaaaacaggtctgatattaaccattccgacgttattcatcaccctgatcggactttatttatggctgttatggctcgcttgagatgaaaaaccttttaagttgaatcttaaaaggtttttttgtgtcaaaaatccgaaaagtaaaacttttatattttaaaagtatagacatttaatttcaaaagattataatattcatgaaaacgttttaactttatgaaagaagggattcctcatgaaaagaattttattagcctgcagctcaggcatgtccaccagccttcttgtgacgaaaatgcagaattacgccagctccatcggtgaggaggccgagatttgggcagtcggacaggataaagcaaaagaagcgatgaaagacgcagacgtcgtactgatcggcccgcagatgagttttttaaaaggcgagcttcagaaagaggcggacccgcttcacatcaccgttgatgtgattgatatgatggcatacggcatgggagacggcaaaaaagcatacgaacaggccgtttccttgatagagaacaaataaaggaggcgataagcatggaaacgtacacggatgaacagatcagttttcagctgattcttcacagcggcaatgcccgcagctgtattattcaatcgatacgcgcttataaagacggccggccagatgagtcagacacctttctgacaaaggctgaagaagaactgggaaaagcgcacgacatccattttcagatgattcaaaaagaagccggcggcgccaagacggatgtctccctgctttttatgcatgctgaagaccacttaatgtcagcgctctcaatgaaagagatcgtcaaagaaatgctcgacttatttcaatcaaagaatttataaaaagccgggggtgaagacgtgtttgagaaaatcagccaattccttgttccgatcgcgggcaaattaaacaataaccgctacctgcaagtcttacgggatgcttttatgctggcgtttccgctgaccattttcggttcggtgttcgtcgtgctgacgaacctgccgtttttaaacaaaatcatgagcagctccgccctgtctgtctttcaatccggatttggcggcgcttcgacggcgacgatggggattatgtccatttttgtcgtcttcgggatcggctattacctttcaaaaagctacgaagtggaggccgtattcggcggagcgattgcattggtttcttttctgctgctcaccccgttcgtcttagagccggaaacgggcaaagcggtcgcaggcgtcattccggttgaccggcttggagcaaaagggatgtttctcggcatgataaccgcttttttgtcgggtgaaatctacagaagaatcgtccagagaaacttaacgattaagatgcctgccggtgttcctccggctgttgctaaatcgttcgccgcattgattccggcttttatcacgcttaccgtcttcctcttgatcaatgcggctgtcacccagatctttcacaccaatctgcatgatgtcatttatcatacggttcaagccccgcttgtcggacttggaagcggcatcattcctacattaatcgctgttttctttattcagattttatggtttttcggacttcacggacagatcattatcaattccgtgatggacccgatctggaatacattacaggtcgaaaatttggctgcgtatacagcgggaaaagagattccccatattatttctaagccgtttatggagatttacaccgtcggaatgggcggaaccggaatgacattggccatagtgatcaccatcttgctttttatgaaaagcaaacagatgaaacagatatccaaactcggtctcgcgccgggcattttcaacgtcaatgagccggttattttcggtttgccgatcgtgatgaacccgatcattatcattccgtgggtgatcgcaccgatggttgtcacgctcgtcacctacctggccatgtcggcggggatcgtgccccctcctactggcgtgaccgtgccctggaccgtcccccttttcattaacgggattatggcgaccaattccgtcatgggcggcattatgcagctggtcaacctctgtattgtgtttattatctggttcccgtttcttaaagcgctggacaaattaaacatggcaaaggaaaaagaagccgaggccgagcagcaagcacgggatgacagcatgagtatgtaatcaaaatcgcagtaagggagagaaatcaattgactgaatcaaatattcaatatcgttttccggaaggattctggtgggggtcttccgcctccgccacccaaacagaaggcgccgccgacaaagacggaaaaagccaaaacatatgggattactggtatgaaaaagagccgagccgtttttttaacggcgtcggccccggcgacacgtcacgtttttatgatcaatacaaggaggatatccggctgatgaaagaaatcggccacaactccttccggctgtctatttcctggtcaagattgattccggacggaactggcgaggtcaatcagaaagcggtcgcgttttatcaggacgtcatcgatgaaatgcttgcccatcgcattgagccgtttgtcaatttgtttcactttgacatgccgctcgcccttcagcgtaaggggggctgggtcagccgggacaccgttgacgcgtttgaacattacgccaaaacatgcttttcgctattcggtgacaaagtgaaaaaatggttcactcacaacgagccgattgtgccgattgaaggcggctacttatacgactttcactatccgaatcacgttaattttcaagaagcggtgcaggccggcttccataccctgctgtcgaatgcaagggctgtcaaagcctacagagaattgaaacaggacggacaaatcggaatcattctgaatctgacgccttcttatccgagaagctcacaccctgaagatctgaaagcatcccggattgccgacgcctttttcaaccgctcatttttagatcccgccgtaaagggcgaatttcctgaggagcttgtcgagattctcaaggcggaaggctttctgccgcgttacgagaaagaagatctccgcctcattcaggagcatacggttgacctcttaggcgtgaactactaccagccgagacgcgtcaaggcaaaagaacatgttccgaatccgcacgcccctttcctgcctgagcgtttcttcgatccgtatgttatgcccggacggaaaatgaacccacaccgcgggtgggaaatatacgaaaaaggaatctatgacattctcaccaatctcagagaacattacggaaatatcgaatgttttatttccgagaacggcatgggagttgaaggcgaggaacgcttccgcgatgaaaacggcatcattcaggatgattacaggattgaatttatccgggaacatctcaaatgggtgcatcgggccatcggagaaggttcaaatgtaaaaggctatcacctgtggacttttatggacaactggtcttggacaaatgcttataaaaaccgctacggctttgtatctgtcaatctggaaaacgggggcgaacggaccgtcaaaaaaagcggccgctggttcaaagccgtttccgatcaaaacggattttaacagatgaggaggtacagccatgcttggaggtattgaagccggcggcacgaaatttgtctgtgccgccggacaaaaagacggcaccattctggacagggcggagtttccgacgggagaaccggatgacacactcagacaagtcatccgttactttaaagatttcccgatagaagccatcggcatcgggtcgttcggaccgattgacatccgccccgacagtcaaacatacgggtgcatcaccgcgacgccgaagacagcctggcggaactgccctattcttcaaacgatcaaaagcgcactgcatattcccgcaggcttcaccaccgacgttaatgcggcggcgctcggagaagcttctttcggcgcggccaaaaacgcggacagctgcctctatttgacggtcggcactggcatcggagcgggcgccatcatgaacggcagatttgttcaagggctgtctcatcctgaaatgggccacatttatgtcagaagacacccggacgacggctacaaaggcaattgcccttaccatacagattgcctggaaggcctcgcggcaggtcccgccattgagaaacgctgggggaaaaaagcatatctgctggcggatcagcaggaagtgtgggagcttgaaggctattatattgccgaagcgcttgtgcagtatattctcatactttcgccggaaaagatcattctcggcgggggcgtcatgaagcagcatcagctgttctcttatatccgtcagcacgtgaaaaagcggctgaatcaatatattgatctgcccgacattgaacacttcatcggtccccctcaattagggattcactccggcgcggccggttcgctcgtattggcggagcgcgcattagagacggcaaaccgggaggcgggaaaatgacgaaactcttatttttggaaccggtttttaaagaaagattatggggcgggacgaagctgcgcgatacattcgggtatgagattccttctgagcggacgggagagtgctgggcgatttcagctcatccgcacggtacatccatcgtgcggaacgggccattttccggaacatcattacaccgtctctggaatgaacaccctgacctgttcggacatccgaaagaagaagcttttcccctgctcacaaaaattcttgacgcaaatatggacttatccgtgcaggttcatccggatgacgcatatgcacatcggcatgaaaacggagaactcggaaaaacggaatgctggtacgtgttggactgcaaaaaagacgcggagctcattttagggcaccgcgcccaaacaaaagaagatttcgttcggctcattgaacgaaacgagtgggatcacctgctccgccgcatccccattaagcccggcgactttttctatgtcccgagcggcacactgcacgctttatgtgaaggtacgctcgtccttgaaatccagcaaagctctgatgccacctaccggctttacgactatgaccggacggatgggaacgggaataaacgcgagcttcatcttgagaaagcaattgacgtaacagacattccccataccgatgaaaatgtaaaaagcactaagcatcggatcggagatgctcttattacgatactcgccgaaacacctttcttttcagtttatcaatgggatgtgagcgggaaagcatcattccccgcacccggccggtatttactcgcaagcgtcattaaagggcgcggagaactggatggatgccccgttcagaaaggcgatcactttatcgtgccggcggattccggagattttgttatagaaggagattgtgaggttatcgtttcacatccttcatcatcttaaaaatcaggaggtcttttatatgcttaaaaagttagcagtctgcctgtctatcgttttattactcttaggagccgccagtccgatatcggctcacaccgtttatcccgtcaacccaaatgcccagcagacgacaaaagatatcatgaactggctggcccacctgcccaaccgttcagaaaacagggtcatgtccggagcgttcggcgggtacagtgatgtcactttttcaatgacagaggaaaaccgcttgaaaaacgcgacgggacagtctcccgccatctacggctgtgactatgggagagggtggctggaaacagcggatatcaccgatactatcgattacagctgcaacagcagcttaatctcatactggaaaagcggcggcctccctcaggtcagcctgcatctcgcaaatccggcctttccatccggaaactataaaacggccatctcaaacagccagtacaaaaacatccttgacccttcaactgtggaaggaaaacggcttgaggcgctgctcagcaaaattgccgacggccttactcagctgaaaaatcaaggcgtcaccgttctgttcagaccgctgcatgaaatgaacggcgagtggttctggtgggggctgacaggctacaaccaaaaagacaatgagagaatctcgctgtacaaagagctttacaagaagatataccgctatatgacagagacaagaggattggataaccttttgtgggtgtattcgccggatgccaacagagactttaaaacagacttctacccaggctcatcttatgtggatattaccggtctggacgcttacttcactgatccgtatgcgatatcaggctatgatgaaatgctgtctctgaaaaaaccgtttgcctttgccgaaaccggtccgtccggcaatatcggaagctttgattatgctgcttttattaatgcgatcaggcaaaaataccctcagaccgcgtactttttgacatgggatgaacaattaagtccggcggccaatcaaggcgcgcaaagcctttatcaaaacagctggacgctgaacaagggcgaaatatggaacggcgggtccttgacgccgatcgcggaataaccgcttcttttgaaaatcggttttaaaaaacggctctgctgggcatattgttaccgttcaaaaaggagggttcaacaatggaaaataacaaaaacagcgaagaaacgctttccagtaagacgaccggtaaaggcgagtcagaagacacgctgacaaaccggcagggccatccggtcactgacaaccagaatgtcaggacagtcggcaatagaggaccgacgacattggagaattatgattttttggagaaaatcagccactttgaccgcgaacggattcccgagcgcgtcgttcacgcgcgcggcgccggcgcacacggatactttgaggcgtacggaagttttggagacgaggagatttctaaatatacaagagcgaaagtgtttcaaaagaaaggaacgaaaactccggcgtttgtgcggttctctaccgtcaaccacgggaagcattccccggaaacattgcgtgatccccggggttttgccgttaagctttataccgaagacggcaactgggatctggtcggcaacaacctgaaaatcttttttatccgtgatccgctgaagttcccggatcttgtgcacgcatttcagcctgatcccgttacgaacattcaggacggcgagcgtattttcgacttcatttcccaatcaccggaagcgactcatatgatcactttcttgttttcgccgtggggcatcccggccaactaccggcagatgcagggctcaggcgtccatgcctacaaatgggtcaatgaagaaggaaaagccgtgctcgtcaaatatcactttgaaccgaaacagggcatacgcaacctgacacagaaggaagcggaagagattcaggggaaaaactttaaccatgcgacacaggatttgtatgaggcgattgaaaaaggcgattaccctgaatgggaagtgtatgcgcaaatcatgactgatgacgagcatcccgagctggattttgatccgcttgatccgaccaagctgtggtataaagacgatttcccttggaagccgatcggcaaattggttctgaacaaaaacccggaaaactaccatgccgaggtggaacaagcatcattcggaacgggcgtgcttgtggacggccttgatttttcagatgacaaattacttcagggacggacattcgcctattcagatacccagcggtaccgcgtcggcgcaaattacctgcagctcccgatcaactcgccgaaaaagcatgtcgccaccaaccaggaaggcgggcaaatgcagtatcgggtcgatcgggcagaaggacaaaacccgcacgtcaactatgagccgtccattatgggaggactcaccgaagcaaagcaggatgggaaagaccatacacctcatgtcgaaggcgatgtgaagcgggaagcgatcgaccggccgaataacttcggccaggccggtgaaacataccgcagattttcggaatttgaacggaccgaattgatcacaaacctggtcaatacgctttcttcctgccggaaagacattcaggatcaaatgattgagaatttcacaaaagcagatccggactacggaaaacgtgttgcggaagggctgaaaaaagcctccgaaagcagcagcggcgggccgatcggcactactgatacagcacaagccgcaaaacaggctgaacaggaaagccatccgtctgatccgtattaaataaaaaaacaggacaatcgcgtcctgttttttttttgagctaattcagctcctgtatattctgctccgccgcggccgcaaatactttcggctccggacggtcaagatcttcatggaataaacttactttgtgaatctgccggttgtcgtacagatgaaagtagtagttcccggtgtcacagcacatgaccgacgtatattgcgtataatcaatttcattctcctctgtgatcaccgcgccttttggaatattcacattggacagcacgtgaaaagcggccgtaacgccatccgtttcatgagcggcaggctctaaatgctctttcagataagcggctctgatgaaccgggatggcggcgtgtaatcaccgggaagcccgatcgttccagatccttggccgaaagcggttaatgtcattccgcccaatgttttgctttctgactgctgcggcctgattccgatataatggcgcagattggtcacatgccaaggaaattccggactgttggtcatcactccgggtttgttgtcatatactttcattccctccggtgtcggctcgatgacaatgcagccgcccgtgcggtctgataaaatccaatgaagaggcagcaccgtatccaataacattaacttcttctctacaatcgtcagcattgagagcttttcctttatgtcttcaagagattcacagtttgataaggcccaggtgacaaactcatgaggagcgatgtgacaggtgccctcccgttccgctttctcgtatcccgcaaagcccggaaaatacagcgtcgcacacgacagccctttttcatttacgccgtcggcaaacagaacattgccgagatttctccccatgccgataaatgcgtatttcgtcttatgcatcctgccgtcagcttcgcttttccagctgtactgacgagggtaaagcacgacgtccgtaccgagctgaaatgcaaaatccatcgttcgcgccaataggtgattgccgtctgtcgttttcaatgtaagacttgtacacatatcatcaatccccttttcattaatgaaatttacacaaagtaaactattctttcagcttaacgaataatggctccattcgtcaaaagattgacacatttctccttcatacatattagtcagtaagcatatccataccttttaatccctggtaaatcgtttaggcggcagtgtttgttccgtttttcaaaaaactttgaacggctgtcagcgaggctttacaatgtttttcctgcatgctggaatttgtaaacggcaggtcaatctgttaagctatgtctttatgttaaagaagaacatacggaggagattatctattgaaagtagaaaggcgaacgattgaacatattccgcatgacgaaagacacggaaaggctaaagatttattccccgtctggttcggggctaatatgcatattacgacgttagtcacaggcacactgcccgttacaatgggactcgatctcttttggagtatcgccgccattgtgatcggaacctttatcggcgcaatctttatggcgtctcattccgcacaaggacctcagctcggaattccgcaaatgattcaaagccgcgcgcaattcggcgtgatcggagcgattctgcccctctttttggtcatgtttatctacctgggcttctttgcgagcagtacgattctcgcagccggtacactgagcagctttgtcccgattccggcttcatggtgtattatcggcttaagcgccatctgttttttactcacgatctacggtcatgatctgattcacaaaatgcagaaaatcctctcttggacctcctttgccgttttttttgctgcaacgattcttatttttcaactgccgattccttcaggaagctgggtgcccggctcattagatctgcctgtttttctagtggcggtcagcgcggtggccacatggcagctggcatacgcgccatatgtcgcagattattcccgttatctgccggtcaaaacaccggcatcgcatactttttggtacagctatgcaggtacgtcagtcagttccatctggatgatgcttctcggcgccattttgacgacggcgctcccggaatttaccgctaatgcgggaaatgagattgtccgattgttcggtccgttttcctttattatgctgatcatcgtcctgttcgggcaaatggcgatcaacgtctttaatttatacggagcctttatgtcaaccacgactaccttggagccgtttttaaaactgaaggtgacgccgaaaacgagagtggtaatgatcctttgtgtgacggcagcgggtactgtattaagtctcttgggccaaagcaatttcatggaactgtttttaaatttcatctttttcatcagttatttcttaattccatggacggcgatcaacctcgtggattactattttatccgccgcggaaaataccacgtcaaatcgatgtttgacgtcaacggacaatacggcagggtcaattggattacagcggccgccttcgttttgtcgattatattagaaatcccgttcatcaatacatccttttacatcgggccgctcgctgaaatattcggcggaggcgacattgcctgggtcatcggcctggccgttccgtcgctgctgtattatgtcctgatgaaatcaaggttaaaacaaaaagaggcgccttccctatgaagacgccttttctttattcatattccttccatacacccggcagcagttcagaaagttcgtgcgccaataaggtatgggcggagcgctctttcgtccataattccgcacattcgccgtgaaggcggacggcgttcaatacggcgtgcttcgggtcttgatgacagcacagcatgccgagaatcattcccgacagcgtgtcgccggtcccgccttttgcaagcgcgccgtttccggttgtattcctgcggcattccccgtcgggaaaagcgataatggtttcgtttcctttcaggacaatcgtgacatgaagccgctccgcccattccgcggcatattccgctctgttctgctgaatctcttgaatcggaaggcctgtcattctggaaaattcgccgggatgaggcgtcaagatcacgggagctttcctcttcggataggttcttttcgtaatggcgcccgcatccagtatgacgggataatcgccagaaagcagctgatcagccgcctgctgcacctcgtctgtttggggaaggcccggcccgatggcagcggcccggatggtttccccgggctggcccgccgcggcttttatccacccgtcccgccagtacgtggcttccggcagcaccgggacgataagcggaatgacgcctgccgatgtaccgatgacgagcttgccgacaccgcttctcatcgcacccaatccggctagaagggcggctcccggcatgtcatcgctcccggccagcaataacgccgtcccgaacgtgcctttatggctgtccgcctcccgtttcggcagcgtatctttcacatcctgttccgtccaatccattatattcatctctgtacctcctcttctgtctcctatttatattccaaacaagaagagattttaaaccgcacaaaaaaacagccgctcgtttgcggctgtttatgttctgatcggaacatcaagacggtaaagcttccggtaccgttcgttttctgcaagcagctcttgatgggttccttccatttctgcttttccattttctaaaaagacgattttatcagctgtttccacacccgctaaatggtgtgtaatccagaggatcgttttctctttaaagacatcaaaaatcgtatcaagcaattctcgttcagtgaccgcatcaaggccgatcgtcggttcatcaaggataatgaccggcgtgtcttggagcagaatacgggcaagcgcgatccgctgccgttccccgcctgagaaacgaatccccgtctcctgcacggacgtttcatatccgtcaggcagtgattcaatataatcatgcagcttcacttgccgagccgcacgcttaacatcttcatcactcgccttgccgtttccgagccggatattgttcataatgctcgtgttaaagagatgaggtttctgattcaaaacggccaccgctgaggaaatctgctcctgcacggccgcagtttccagcccgttcagcatcaccttgcccgaatcgggaactaaggcgccttcaattaaagcgagagaggtcgacttaccggagccgctcctgccgagcagcgccattttttccccctggcggagagtgaaggaaaaacggtcaagcacatgactgtgctgatcataagaaaacgtcacgttatcaaatgtaagtgtcacatcggatacatccagtatctcatctgtctgcttcacctcacgacttcgcagctccggagccgccttactcattcttttgatggaatcctgataagaaggcacttccgtcagcgcatccgaaaggggcagaaacgcctccgtcaatggaaatacgacaagcacaaaggctgcgatcatcgtgttggcgatgctgccgtccgcatactgacccgccgtccagaacagcatgatcaatatgaagccgccgacaaggcattgcgcggcgagatcacgccatctcgtaaaccgctgacgtttgctttcaaggtcaaaccatgccttctctttctcttcataagaggaaataaaggccgcctgtcgtcccgagaacatccagtcgctcacgccgagcacggcatctgtcagccggctgtagagcgtattccggccgcttttcagcctcatgtttttcgctctcgtcacaagaagcgacacaaccggaaacaatacaaccaatataaacaggtaaatcgccgcaaaagcggcaaacggccaggaaaaaaagccgagtccgataacggatgccgcatacagcagcaaagcggaaaccgccgggaaaatcgtttttaaaaacgcatcctgcaaatgctcaatatcctcagccaaaatgccgagcatgtcgcccgtccgaaaacgggatgaaagcatgagcgaggccggctccagcatattgtaaagccgcaccctcatatcggacacgattttcaaaatgatatggtgccccgtcaggcgctcggcgtaccgtgagactgaacgggcaatcccgaaggtgcgcacggccacaatcggaacgtacaccagcaggatattctcaggccttgtcgccgacttagagatcaaaaaaccggaagtgaacatgagaaaggccgccgaaaaaatcgtcaccgcgcctaaaaaaatcacaagaacaaacaaacgggcattttgctttatatacggcagaatccattcttcttttctcatgttctttcccccagttgcgcctttacaagtttggcatatacgccttgtttcgccatcaattcgtcgtgggtgccgatttccgccaccgcgccgtcatcaagcacgataatttcgtccatctcaagcatccagtgaagacggtgagtggccagaaagacaagtttgttttcaaacaggtctttcatcgtttcttttatttcatattctgtttcaatatcaaggtgagcggtcggctcatccaaaaggagaatcggccggtttcctaaaaaggctctggccagcgcgacacgctgagcctgccctccgctgagcgcccgtccgccctcgccgatccggccgtcaaggccgccgggcagatcgcggatcagtccggaaagacccgctgaatcagcagcgcgcgccgtttcctcacgggaagcatcaggatgataaaaccggatattattcataagcgtgtcatcaaaaatgtacggatgctgcgggatataaagcagctgcttctgccagccgtctgactgcagatgcgagcgggattcaccgtttaccttgatctcaccggacgcaggctctaaaaagccgcccagcacatcaatgagtgtcgattttcccgcaccgctttccccgataattccgattttcttcttccctttaaaggacagatgaaattcagacatcgattctcggacggacaaacgcgtaagctgtaattcatccccgtcagtccacgtatcaagttcgagcggcttttcttctttaaaaccgggctgcgccaaaatcgcttgaatggttttccccgcctcctgcccgtttaacgtcgcgtggtaatcatttcccacttcgcggaccgggagaaaatattcaggcgcgagaatcagcgctgtcaatgccggaccgagcagaatttgtccgtctatcagccgcaggccgagaaacacagccactgtcgccaccgacagcatcgtaaagaaatccagggcgaatgatgataaaaacgcgacccggagcgtgctcatcgtcgccttgcggtatctctcactgacatgaaagatgtttttactgtgtgatttgcttaaccctaaaaaccgcaatgtctccagtccgcggagcgaatccacgaaatgattggaaagcgtctgataggacttccattggcgatcggcttttttctgtgcgacaagtccgagcaggatcataaatacaatcaaaatcggaagcgcaagaatcagaatcaaagccgatgttttatcctgaaaaaacacgtaaataacaacggccgccggcacaatcgccatgctgaccattttcggcagaaacagctctaaataacggcggaactggctgatgccttccatcgccagcgtcaccatccggcccgtcccctcttttttcgcaaagcgggggccgagacggaacaattgctcaagaaatctttttcttaagtctgcgccggtttgcgcggcatattggtacacgattttctgccggaccgcggttaccgcatgccggaccaaaaacgcaagcaggaaaaagccgataaccggataaagagaagcaatccgcttcccgttaaataatccggttaccgcctggctcagccattccgcctgcaagatgatggcggccgtttgtataatcgttaatcccgtaatgatcgcaagaatccgcttcattcctttataaagaaacaggtcttttcccattaataagtcataggctccttatggctgacgcgtttccggaagacataatagctccagatctgactgccgatgacaaacggcagcagagtcagtgcaacaattgtcatgaccttaagtgaataatcaccggaagacgcgttagctactgttaagtcatacgcgcttttcagcgagctgaccatgacgcgagggaacagagagataaaaatcatcgcaactgtcaaagcaagacccgcgccggtcataccgaatgcccagccgtcttttttcttgctcatgaacacaacagcaagaacgttgcagatgacaatcagcacgaataccggaatcgtgatgtttgcccggcgtgtaaacatatccgtatcgtatgcagacatcgcaaagaaagcaagtacaacaagaaagataacaccgattacgcgttttgccatttttctcgcacgctcttgtaaatcaccgatcgtgcgcagtgtgacaaacattaaaccgtgcaggaatgaaagaagggtgacggctgctccgccaaggacggaatacacgttcacaatatctgagaaacccgcatgcatattcatatggccgtcaatcggcatgccgcggaacaagcttgtgaagataaggccgaatacaaacggcgggataaggctgccgaagaaaatcacccagtcccatgttttgacccattttaaatgattcacttttccgcggaattcaaacgccaccccgcggcccattaaagcaagaaggatgatgataaacggaatataatatccgctcagcatcgtcgcataccagttcgggaatgccgcgaagatcgctcccgtacctgtcagcagccatacctcattcgcatcccagaacgggccgatggtgttaatcagcactctgcgttctaattcattatggccaagaaatcgggtcgaaatgccgacaccgaaatcaaaaccttctaaaaagaaaaatccgacaaacaaaactgaaacgagtacaaaccaaagatcatgaagtgaccccatggtagacctcctgactgaacggatccgttgatacaggaacatccttgtgatcatcatggtccgcaccttttttaatttcacgaacgaataggaagacaagcagcgcgcctaaaatcaagtacatgacgccgaaaccgataattgaaaacagcagagatcccgtcgttacgttaggcgaaacggattgtgcggttgtcatttgccccataaccgtccacggctggcggccgatttcagtcataatccatccggcagagttcgcaatgaacgggaatgcgatcagtgcgatcatgccccgtaaataccacttgctcgtatgaagctttttgcggcggttcagaataaagcctgcaatcgcggcaaaaatcataagcgcacccgctcccgccataatgcggaaactccagaacgtcgttttaacaggcgggatatagtcgccttttccgtacgttttttcatattctttttgaagtgttttcatccctttcacactgccgctgaacttctggtaagccaagtagctcagtgcgtaaggaattgaaatttctgatgtgtttttttctttattcgtatcaatattcgcaaaagccgtccacgcggcaggatcaccgctgtcatcccaaagcgcttcactggcggccattttcatcggctgcgattccattaaatgctcagcctgcatgtgtccgctgaacgcaacgccgataccggcgatcagaccgacaatcatcgaaagcttgaaagatttatggaagaaaggcacttcttttttcttcaataatttaaatgcgctgacaccggcgataaagaaagcacccgtcgcaagcgctccgaaaatgacgtgagggaattcaacccaaagctgagggtttgtcaaaagcgctccgaagtcattcatttccgcgcggccgtttttaatcgtaaagccgaccggctcctgcatgaatgagtttgccgtcaaaatccagaaagatgacataatcgttccgaaggatacaagccaaatgcaaagcaaatgcacttttttagataaacggtcccagccgaaaatccataatccgataaaaatagactccataaaaaacgccaaaagcgcttcaatcgcaagcggagccccaaatacgtccccgacaaaacgggaataatcagaccagttcaatccgaactggaattcctgaagaatccctgtgacgacgccgacagcaaagttaattaaaaagagatgcccccaaaatttagccattttgagataggtctcttgttttttgacaacataaagcgtctccatcaaagcaaccataaacacaagcccgatagacataggcacaaacaagaagtgaaacaatgttgtagatgcaaattgaatgcgggctaataccaactcactcatgatgtttttcctccaatctggtaaattgctcaacatttcacaaacatagtgaaatcattgctcggtatttcacaaaaaatgatatatttgctcaatgtttcacaaattcgtcaaaactattgaaatatcagcctgtacaccctgggggacagcggctgtcatagaaatgattcaatatcattactttacaacgattcagcccaaaaaaaaagatcaatatacctaaaatcaggctgaaattgtgactgattattgtcggatttgtagagattttatgtcagcacctaggatatttgtccctttgatatcgtacctcttttttattcgtgtggcgaacaaaatgcttttctcggtgaaaaagcccgccaaatcgccattttgagaaagaaaatgtgaagaaagcatgtcctctagtaaattcataatatatgaacaatttaaattttttagtatactttaaatggggatattttttcactacataacgactgggggaacaagcatgggagaacttcaaccaaaattgcaaacggattcaatccaaaaacaggaacggactgataactggtttgccagagcaatgaatataagaatcggcattattcctcttcctatctatatcctgcttttcttgcttattacggtgtttgtcatgagccgtgatgtaaaaagcgacattctgacatcaattgccgtcatgagttttttcggatttaccttcggccagatcggaaaatccattccgatcgtgcggtccatcggcggccctgcgattctcgcaacctttattccatccgctgtcgtctactaccacctgcttccgaaagacattattacttcaacaacagaattcacggaaagctccaactttctctatctatttattgccggtatcgtcgtcggcagtattctcgggatgaaaagagagacgctcgtcaaagctttcgttaagatttttattccgctgatcgccgggtctatcgcggccgccatcgtcggcttatgcgtcgggacgctgctcgggctcggctttcagcacacgctgctttatatcgtcgttccgattatggcggggggtgtcggtgaaggcgcgattcctttatccatcggctactccgatattatgccgatgtcccagggagacgcctttgcgcttgtgctgccgtccatcatgctcggcagcctgtgcgccattatgttatcgggtttgctgaatgtcatcgggaaacgcaaaccggaatggacgggcaacgggaaggttgataagtctgatcattccgctcccgcattggaacagccggccgatgataaaacgtttgatttgtcctttttcgcttcgggcggtattttagcggtttccctttatttggtcggcatgctggcgcatgatttctttcagcttccggctccagtcgtgatgctcgtccttgccgttctcattaagctgttcaggctggcgccggcttcgattgaaaacggagccttcggcgtctcgcgctttttctcgacagccgtgacctatccgctcttatttgcgatcggcgtttcaatgacaccgtgggacaagctgattgcggcgtttacaatcagcaacatcattaccattttatcaatcgtcgtcacgatgatggccgtcggttttctgaccggaaaatggctgaatctgtacccgattgaaacggcggttattaatgcctgccattccggccagggcggcaccggcgacgtcgcgatcttgagcgccgctgaacggcttgagcttatgccgttcgcccaagtgtcgaccagaatcggcggagcgattaccgtgagcgtcacccttctgctgcttcatcaattctattaaactgaaaaaaagcctccgcatatgcggaggctctgttatttcatcacattttgaatataagagccgaatgccgcgccggacatgcccggcgacacacggacgcggtgaagcccgtaaagcccctgatctctagacgccgctcccggctccgtcgtgaccgccatacggtagcctgacgaggcggcggcttttaatgtttctttattatatcgtccgacagggtagctgatcatagacgtccgctgcccgaacatttgatcaaataaacgcttagagtccttcatttcacgtcgctgctgctgcggtgtgagcccgttcaattcgagatggttcatcgtatggctctgaatggaaatgccgtgggcggccatctccttcatctgcttctcagtcagatgattcttatgcccgataaagtttccgatcataaagattgtcgctttcatcttgtatttctttaaaatgggataggccgctttcacattgtctgtatagccgtcatcaaatgtgaccagaacacatttttcacgcggctccttatcctccgtcagcatcagataggcctcttcaggagtcatcgtataatagccgtgatcatgaagccacttcatatgctgccggaattcttccttcggcacacgcaggctgtttccctctgaaatgctgtgatacatcagaatcggcagtctcgccatccctttcgtttgaacccaggcggacgtatccggctcttttttgatttgccgctttacggactttttttcgctgtgcgcttctgccttcggaatgctttgttcggcgcttgcctcatgacccgagcaggcggcaagtgtaaacacggcagccaaaaggcacatgcacatgatcatgcgtttcatcgttttcctgctttctgtcttctatttactttttatatcggttatgcgtcataaattgttacatcaaaaaaaccggacatccagctgtccggctttgcgttatgagcggattctgatttctgtttcactgtcaaaaaagtgagccttattcatgtcgaaagcgacggtcaattcctcaccggcacgaatgtcatggcgggcgtcaatccgggcgataaaatcctgatccccgatccgggaataaaccataatttctgacccaagcaattccgcgacattgattttagctgtgatggatgaattcttataagattctaccacaatcagctcgtcatgtatgtcttccgggcggatgccgaagatgatatctttgccggcataccctttttcccggagcattttcattttcccttccggcacgctgagagcggctgaaccgatctgaatggcgccgtccgtcagctttcctttgaaaaagttcatcgccggagaaccgatgaacccgccgacaaatacgttttcgggatgttcatacacttctttcggggtgccgatctgctgaatttttccgtccttcatgactacgatgcgtgtcgccatcgtcagtgcttctgtttggtcgtgcgtcacatagattgtggttgtttgcagcctttggtggagcttaataatttctgcccgcatctgcacccgaagctttgcgtccagatttgacagcggctcatccattaagaacactttggcgtccctgacaatcgcccgccctaatgcaacccgctgacgctgtccgccggagagcgccttcggtttgcggtgcagatactctgtgagccccagcattttcgccgcttcttcgacacgttttttaatctccggtttcggcatcttcctcagcttcagaccgaatgcgatattatcatagaccgtcatgtgcggatataacgcatagttttgaaacaccatggcgatatccctgtctttaggagcgatgtcattcactctcgtgtcaccgatatagaaatcgcccttcgtaatgtcttccagcccggctaccatccgcaaagttgtcgacttgccgcaacctgacggaccgacaaacacgataaactctttatctttaatatgaaggttaaaatcatcgacagccgcttctttttgatcgtaatacttataaatatgctcgagccgaagttccgccatgtatatccccctttatttgtaaacgctttcttaaataggattgtaacagcgtcagacggcggcggatataggcaatgttcataaaaaaagaccgctgtcttcgtgcacatttcccatttaatgtgatttttcatattgcagacaaatgaaataagccagcagggcgccccgatatgtcttaatatcaatacctgagcgttccgcaaatttatcaatccgatattgaagactgttgcggtgcaaatgcagttttttcgatgtgagcgacatgtttgagttatgttcaataaaagtctgaatcgtatgcttcagctccggttctttctgaaacagcagcgccgcttcttcgtgaagcaaggctgagagcttttctctgctttcctccgtgagcatggccggaaataccgtttccgcggtcagcgtgctcagctgcgggagatgacgccggccgatctgacaatattgctgttctctctgataatgaaggcgcagacgttcccccttgcagtaataccttccgacgaaaaaacggacactgaaataaaaatcgccttcgagaatcttcacaaaagatgcgatgtcatccgaatctggcgcttccagcttttcttcctccacaatcacgccatgatccctccccgtccggacaactgtatatgaaaccggccagaaatggcgcagcgcttctgtgaatgccccccagtcccgttctcccaataagtcataatggataaaacggacacgcggctccttgacatcaggcaccggaccttcttccagcagaaaacgccgccacctctttgctgccgccgtctccggaaaaaaaacgcctttttcttcagcgggcgtcaaaaatgattccagaagcagtttctccttcggggtgatatcctccttcggaatggcgacatagacccgccttttctcatcataaaagcaaaagacatcctccgccgtacagcacgtatcagacaacacagccctcgggtaaattgccaataacgggttcatatgcgctcctttctatcgctctatcatattttcagtataaaacgtccggccgattgtatccacttcgttttaagaaacagctttcaggctatttcccgggaaacggatataaccgcttctgccggcataagaaaaaaaccctccgcgccggcagagggatcctttttatttagagatatcgacgaagccttcaccaaagacatcacgcacatcatgaacaatgacaaacgcttttgtatcacagcttttaataatttttttgagcatggaaagctcttgtttctggatgacgatatataaaatttccttcgactgccccgtgtaatttcctttacccgacagcagcgtaacccctctgtccatcagcgtgttgacctgttcagcgatttcgtgcttatgctcagatataattgtcaccgcttttttcgtattcaggccttcaatgataaagtccatcaccttcgttccgatgtacagcataacaatggtaaacatcattttttccgcaccgatgatgaaataagaactgaagacgacaatcagatcaaagaacaaaagcgcatagctgatattccaatcgagatatttgttcgcaatcctcgccaaaatggcagaacccgcagtcgtgccaccgactcgaataatgatcccgattccgacaccggcaaacacacccgcaaaaatagtattaataatgagttcatgtgaaggcgagtgccaatcatgcgtcagatgcagaaacagtgagttggcgacaacggtaatgatcgtataaagcgttgtttttccgtctaaaaatttatatccgataatcaataaaatcccgttcaaaatgatattcgtcaccccgggcgaccattcaaacacatagtacaagatcagggtgattcccgttaccccgccctctccaagatcattcggaatggcgaataaattaacggccaaagcaaagataaaagctccaataatcagcatcagcacatccagcaatctctttttcatcccagacactcccttttttataaaatcaaaaaagcccgggagagcactcttcattaaaagagcagaaactcccgggcttttatcccaacgtgtcacagcaggaacctgctgtgtgttttctctcggtccagaccaattcagcattgcggaaccctagaaaaccactgttttttatgttcagtttttatattatctttcaagattatacgggaaatcacgaacatgttcaaccactcttttttcattaaacctatggaaaatgcgaacgatctgccgatactaaaaaggaccttaaaatacatgactaaaaaatcattaaaatactttttttctcaaaatattattgactataggttattttacaggcattatagtatgtagtttttaagaaatagtttacataggaggaaatattatggcaggcaacctggtgtcttgtaaggcatgcggcaaagaaatcgctaaaggcgttaaaaaatgcccaaactgcggtaaagatcagagaaactttttcatgagacataaaatcatcacattgcttctggcagtggtggttattatcattctcgtaaacatcggcggcggaggcggttcttcgtcatctaaaactgcgtcttcaaaagctgcggaatctaaagaaaaactgtataacatcggtgacactgttaagactgagaaaactgaagttactgttacgaaagtggaaaaaagagattcagtaggctctcaatttgtcgagaaaaaagcgtctgacggcggcgttatcgtagctgttcaatacacggttaaaaatgtttcaaacaagccgttaagctctttctccattccaagagcgaaattagtagattctaaaggaacatcttatgattcagatattgatgcttcttcaagctatgcaacagaaacaaaagtagacaacagtaaaattttaagtgacttgaacccgaacattaaagtgactgacgtaaaagcttttgaagtggataaaaacgcatactctaaaggcacttggaaattaaagttcagcaacgatgttgaagtgaaaattaaataatcatcataacaaaagagaccctcatcatttgaaggtctctttctttttacaccttttggtacccgttcacattggaggactgccacttccaagagtcggcgcacatttcttcaagcccgcgctttgcttcccagcctaattcagccttcgcttttgccgggtctgcgaagcatgcggcgatgtctcccgggcgccggtcggcaaaacggtacggcacttcttttcctgatactttttcaaacgccttgaccatctccagaacgctgtagcctcttcctgtgccgagattataggcgtcggcgcccgttgtgttcagcaccttttcgagcgctttgacatggccctcggcaaggtcaacgacatggatgtaatcccgcacgccggtgccgtcctttgtcggataatcattgccgaacacctgcaatcgctcaagcttgcccacagcgacttgtgcgacgtacggcattaaattattcgggatgccgttcgggtcttctccgatccggccgctcgggtgcgcgccgaacggattaaagtagcggagcagcgcaatgctccattcagagtccgcattatgcagatcgcgtaaaatctgttccagcatcagctttgtctgcccgtaaggattggtggcgcttaaaggaaaatcctcagtgatcggcgttgtttccggaacgccgtaaaccgtcgctgaagaactgaagacgatttttttcacaccgtgtgcctgcatggcttcacataaaataaacgttcccgtcagattattatgataataacggagcggaacagccacagactcaccgacggcttttaatcccgcaaaatgaatgacggcttcaatctcattttcagcaaacacccggtgaacggcggcacggtcaaggagatccgcttcataaaacacaagcccttttccggtaatgtctttcacacgctccaatgcttccggtgaactgtttgacagattatccagaaccacgatgtcatagccgccgtttaacagctcgacacatgtgtggcttccgatataacccgctccgcctgtcactaaaatcgccatgaagaaagcctcccctattgaatgaattgaccatattatatcggttttttcttcctcaatcatccatttccaaaaagtttaatcgtttagtcatcgtttcttcataatttattttcattcgcgtaaaaaacagagccctcgattcaaacgggttgtgaaatagaaatccctcccccgcgcatggtaagataagacaaaggagatgacggtatgaaaaatgaaatcattgaacgctttacctcttacgtaaaagtcgatacacagtctgacgaaaacaatgaaaactgcccttcaacccccggccagctgacattggccaacatgctggcagatgaattaaagtcgatcggcatgacagaaattacagtcgatgacaacgggtacgtcatggcgactctgccggcgaatacggataaagacgtgccgactgtcggttttctggctcacgtggataccgcgaccgattttaccggaaaaaatgtgaatcctcagattattgaaagctacgacgggcatgatatcgttctgaatgacaaactcaatgtcgtcctgtcgcctgagcaattcccggaactttcccgctataaaggccagacgctgattacaacagacggcacgacgctgctcggagccgacaacaaagcgggcattgccgaaatcatgacggcaatggcgtacttgatcaaacatccggacatcaagcacggaacgatccgggtcgcgttcacgcctgatgaagaaatcggcagaggccctcacaaattcgatgtcggccgcttcaacgccgcgttcgcctacacgatagacggaggccccctcggcgaactgcaatatgaaagctttaacgcagccgccgcaaagcttacttgttacggaaaaagcgtccacccgggaacggcgaaaaacaaaatggtcaacgcttcaaaaatcgcgatggaatttcatcacgcgctgccgaaagaagaagcgccggaatatacggaagggtatgaaggcttctatcatttactttccatggacggagacgtttctgaagccgccctgtcgtacatcatcagagattttgacagagaccgcttcgcagaacgaaaagaatatatgcagaaaaccgccgatgcgctggcggccaaatacggcaaggaaagcatcaagcttgaactgcgtgatcaatattacaacatgagagaaaaaatcgaaccggtcaaagagatagtcgatgtcgcgtatcaagccatgaaaaacctcgacatcgaaccgattatcgaaccgatccggggcggaaccgacggctcacagctctcttacatgggactgccgacaccgaacattttcacgggcggccaaaacttccacggaaaatatgaatacatttccgtcgatcatatggaaaaggcggtaaacgtcattgttgaaatcgccaggctctttgaagagcgcgcttaaaaccaaagcccctgctttggtttttttctttcacatgaaacctttccttctttctttccgtatataaggtatgaaatggaaagaaggagtgaagactatggcaagagggactgtagcgaaagaattgaaaaaaaccttaaaagacccgcgtgtactggagacaaaatcaaacccttttaaaaaactgcggaaaatgttcaaacgatttttttaagataacatctcgttttctttaaaaaaataaagaaagcgctgtcaactcgcagtcatctgttagaagcagttattttgcatatcataaggttttttagggtactgaataacacaaggcaaacgaaaacaccgaagtagttaattagacacttacaaaaaatagtaataaagttatataaacgatcatcattcatcagccgatacaatctatagaaccacaacaagagcaaaatttcttcaacccatagttatttttacggaaaatgacgttattttttaaaaaagtgacaattgtttgaatacttttcgtttgttttttcgtacaataataataccaaaactttttttgggaggtatgtaaaatgatgctacttattttcgctgctttgacagggtatcttgttttctctttcagtaaggacaaccgccggaaaacgccaaagacaagcccgctggtgacagctgccgacacgaataacatcattgatttaaatgcgatccgtcaaaaacgccggatgccgctatcataaaaacgacagctgccgcaaaatcggcagcctttttttatgcacccggccgatatgaaaccttccgcctccttttttcgtaaaacataaaaaaggagtttttttatgtaccatttttacatcaaagagcgaatgtttacgtttaagaatcgttttcaagtgtttcttgaaagcggaaaagaagtctacaatgttgaaggaaagctgttttcattcggtgatgaactgaagctgactgatttggacggccgcacgctcgccagcgtcaatcagaaactgatgtcgctcgttccccgttacgagatttccgtcagcggcaaacccgtctgccaagtcatcaagaaagtcacgtttttcaaaccgaaatttgaaatttccggactcggctggaatcttaccggcgatgtgtggggccggaattttcaagtgacagacggaaaatcaaaccggatgaccgtcaccaaatcatggatgagctggggcgattcctatcatttgcagattgaaaaggaagaggatattgctctttgtcttgcgatcgccatcgtgatagatatgattctatttgagggtgacaaataaaaatatttatcgaaatatattgacaatatgagaaaacatactaagattaagagtattacagtttattctgaaaaatagcatatttccttatcaagagaggtggagggactggccctatgatacccggcaaccgctgttcagcagaatggtgctaaatcctgaagataaggttgagatttgcggacgcaagctcttccctatccgagggaagagtttttttatatttcatttcatcaggaaagaaggaatcgttcatgtcacagcaaaacacagaacaaccattgcatactcttctaagaaaaaacccgccgtttcgcgcggatcaggtcggaagtctgctgcggccggcggctgtgaagcaagcccgcctgcaaagagcggcgggtgagatttcggcagaacagctgcgcgaaatcgaaaacagagaaatcatccgcagcgtggaaaagcagaaagaaaccggcctcaatgtcgtgactgacggcgaattccgccgtgcctggtggcattttgattttctcgaaaatttagacggggttgaggcatttacgcctgaaagcggcattcagtttcacaacgtacagacgaaagcgcgcggcattaaagtaacgggagatattgatttttctcagcatccgatgctcgaagattataaattcctgcacagcattgccggcgatgctgttccgaaaatgaccatcccaagtccgaatatgctgtttttccgcggaaaattggaaaaagcggcctaccagaatgattacaaacaatttcagcacgatgtgtcaaaagcgtataaaaaagcgattcaggctttctatgacgccgggtgccgctaccttcagcttgatgacaccgcatgggccgttttcttatctgaagcggggcttcgtcagattgaagatttcggcacaacgccggatgagctgcgcaagctgtttgccgcttccattaatgacgcgatcaaggaccgccctgacgatctgaaggttacgatgcatatctgccgcggcaacttccaatccacatggacggctgaaggcggctatgatgcagcggctgaaacgatttttgacgggcttgaccttgacggattgttcctggaatatgatgattcccgctccggcggctttgaaccgctccgctatgtcaaacgctctgatcttcagcttgtgcttggattgattacatcaaaacatggcgaacttgaagacaaggacgcgattaaacgccggattgaagaagcttcacaatatgtcagcctggatcagctttgcctcagcccgcaatgcggattcgcctccactgaggaaggaaacctgatcacagaagaacagcaatgggcgaaactgcgtcatgtcgtcaacattgccggtgaagtctggaaataaaaaaaagacacgcgatcagcgtgtcttttctgtttacagaggaccggttccgattaaaatatcgatatctatcgtaatatccgccgcttttcggctgataaaccgccggatgctttcatcagtacatttccatgttaagggcgtcattttcacaagccgctcaaggtcaggctgcgataaggtcttcgtgtaacacagccgtttgcgctcaaaggtttgaaagcccgcttggaatcgtccggccgcagaatcggcggtgtcattccgccgaggactgtctccgaagaagaattcccttacttccttcaaataatcacgccgcggcaccgctttaatgactgtgccgccctttcgtaaaagcctgctgcattccttgtaattccaaggtgataaaacagacatcacgacatcaaaacagctgtcggcaaacggcgcatccgccacatcagcgacggcaaaaaccaaatgatccccgaaggcctttgcggcatgcagcacaccttctttcgagagatcaatgccgattcccgtcacggaaaaagcgggctgaagcaatttgcatacggcggctaaatgagtgccttctccgcatcccgcatccaatatcgccgccgttgtttgcggagattgaatgcggctgatgatggcggcgatctccttttgaaccggcccaaaaaattcccggctgtcaaaaagagcgcgtctcgcttcgaacagctgcctgtcatagcgggttttgaccgatttattgaggaaattcacatatccttgctttgatatatcaaatgtatgcccgtgtccgcacatcaagcttttgtattgtgagaccgccatggccgaactgcatagcggacacctgaatacggactggcatgattgcagtaattccgcgcgttttctttttatagacgtcaataaaaacacctcattcattcgttattccgatgaaatgaaaaaggcatagacaaataaacctcgcaaaattggaagtttaacctatttatctatacctctcattatctgtaacgaatgaactgaatgatcatgaaaatgaccccttttctgccgtcttttgaaggcggtgccctcagatccattttatcagctgcatcccgtctttacaatgaaccggaactgtttttcgggggctttttatacctttttaatccaattacttgtgaacatcctttattttctttatttataatataaatttattattttgaaaatatctaaaaaggttgattttcaaaaattgaaacgataaaatactgctatctcatgtaatatcgttattcttgtatatgatcagtaatatggtctgattgtttctacctagtgccgtaaaagactagactacaagaaagtttgcataaatttgaacgagtgaaaagcatatgatgctctcagtctattcttttcttttggctcttatttatcacactttctggctttcaggaatttgtgacgaataagagctttttttatttccataatacccttataggagttgctcacatgtactttttattgaacattgtcggtctcattgttgtcatggctgttgttttcttatgttctcccaacaagaagaagattaaatggcgtccgattgtcatgctcctcgtctttgagtttctgattacttggtttatgttagggacaaaagtcggcggctttgtcatcgggaagatcggcgcgttctttacatggctgatttcctgcgccagtcaaggaattgcgttcgcttttccgtctatcatggccaatccgacggttgattttttcttcagcgcattgctgccgattatcttcgtcgtgaccttctttgatatgctgtcgtatttcggtattctgccgtggctcattgataaaatcggctggctgatttctaaaatatcccgtctgccgaagctggagagctttttctccatccagatgatgtttttaggaaatacggaagctttagccgtcatccgccagcagcttgccgccgtcagcaacaatcggcttctgacattcgggctgatgagcatgagcagcatcagcggttcgatcatcggatcgtacttgacgatggttccgtccacttatgtgtttacagctatcccgctgaattgcttaaacgcgcttttaatcgccaatatgctgaatcccgtggacgtttctaaagaggatgatattatttacgttccttcaaaagcggagaaaaaagacttcttctccacgatttctaacagtatgcttgtcggcatgaacatggtcattgttattttagcgatggtaatcggatatgtggcgttaacggctgcgttaaacggcgtactcggactgttcatgcacggtttgaccattcaaaagattttctcatacatcttcagtccgtttgccttccttctcggattaggcgtacatgacgcgatgtatgtcgcacagctgatgggcatcaagctcgcgacgaatgaatttgtggcaatggccgatctgaaagggcagctgaaatcacttccgccgcacacgattgccgtggctacgacattcctgacatcattcgcaaacttcagcaccatcggtatgatctacggatcttatcaatctctgcttgatggtgaaaagtcagccatcatcggaaaaaacgtctggaagctgcttgtcagcggaattgccgtttccttattgagcgcggcgattgtcggattgtttgtctggtaaaataaaaaaagcgataccgctccgttttagagtgatatcgcttttttttattgatagacggatgcaggcacgaaaacgtcccggattcctgccgcgtatggtccgagatcatattgtccaaacacaacggcaatgccgtttttcgtaaagaagaaaggtctttcgttattcaggatgatctcttgttttttgacgtcctggtcaaacagatcgtcatgtttcttgatgtagccgtaaagatagtctctcgttttgttggctttcgtttttgtattgagcacatcattgagtgtgacccgtttttttgcggccaggtcgtaattaaaggtctgaacggctgtcagcccgtgtgcgccgcctgtgtaactgtagttttccgtctgaatgctgagcttgccgccttgattatacttcaccttgaaatctgcctggtattccgctttgtagccttgtttttcaccgtcttttttgttttttacatattcttggtacgagttttcaatatagcgtttgaagtcctgattgattttcttttcaaaagatgcgtttcccgtatttgtgacctcggggtacgtcagctgctttacatgcttatacgtctggcttttgacgacgggctttgcagtttgcgcggcctcggctgaaggcgcgaaacctccgaacggcgcggctgtcagcacggttaagagcacggccgccatcattttgaatgcctttttcatcacaactcctccttttcattaccgttccctttttgaaaacggattacactctatagacagcgcagatcagcaaattgtttctgggccttctttcacattttctccatgaaaaaaagagacatggataatccacgcctcttttaccgtgaaggtctttgcgcaatggcttcataaacggcttccgccaaatcggagttgccgaacatctccaaaacgccgatgacggtttgatcaggaatcggttctgattcctccttcggcacgacaagctcttcagccgtttttcgcagctcttcgtttaaaggctgtccggggtaagctttgctgtaaatggccatcggatcaaggtcatgattgacgcaccattgggcaaacaccaaaatcatcatgttttcgtcacgccggtaatattcttcaagttgtttttcggtaaacggcttcactatcaatcgctcctccagaaaatctacccctaagatacacaaacacagggcggaagtaaaccaaagagggtgaaactattatttcatcaacccgcctgctttaaatagcgcatgccctgactctctaaaactgttgtctgaatgtccaggacagcggaagatacggatttgtacggaagcaattttcgttttctcccaatattctttcacaagaaaaaagcgcccctctcatcaaaggcgctttttcattcttatacgtttctgtcccaatgccgatgctcagccacggctttcagaaattgttcatggtttccgtccggaacaagaccggggccgctttcggttccggcggcgagggcgagaagttcttttccttcaccggaggcgccgatcgctttgtaatggctgaaagcttcgttgacgaagtctctggccgatttttgggctttgaggctgtctgtgctttgttttccgcccggaatgaaaacagcgtcgtacaggacggaatccgctgtcaggaacgtggctgacgcttcgagctccgtgccgttttctcccttaacggttccaagcacaggactgatgatatcggctctgactcccgcctgtttgcatgcgtcaagcacttgtttgactttctcatcagaaaacccgtggtcggttaaaaccgcaacctgccttgtcgctgccgtcttcaccgtgttttcctggcttaaggccggggaagtgaacgtttcatcagattcacggtccttcggcggcgggttcacgccgattcctttcgcaacacgctcggcaagcccggcgtcgacgtgactgaagacatcaaccacctgctgctgcacatccttgctgttcacttttccgacttcaaaacagaacgcggagatgatatgttctttctcggcgggagacatgctgttccagaacatcttggcctgagaaaaatagtcattgaagctctcactgcgctggcggatttttctgccttctactttttcctggtaatgaacgtatccgccttcttcttctgaggccggcgacggatcattgttctgcagggaatttttatgataggcgacagggcccttattaatcgtcatccggtggtagccgtcgtattggttgttatggaacgggcagaccggccgattgatcggaatctcgtgaaaattcggcccgccaagacggatgagctgtgtatctgtataagagaaaagccggccttgaagaagcggatcattggtgaaatcaatgcccggcacgacatttcccgggtgaaaggcgacctgttccgtttccgcaaagacattgtcctgattgcggtcgagggtcatttttccgatcagcttgacgggaaccaactcctccggccacagcttcgtcggatcaaggatatcgaaatcaaatttaaattcatcttcttcgtcaatcatctgaacaccgagctcatactcgactttgccgccgttttcaatcgtttcccataggtcgcggcggttgaaatcgggatctttcccggcaattttctgcgcttcatcccatacgagggaatgaacgccgagcacgggtttccagtggaatttaacaaagcgcgcttttcctttctcgttgacgaaacggaacgtatgcacgccgaagccctccatcatccgatagcttcgagggatgccgcggtcagacatcgtccacatgaccatgtgcgcggattcaggattgtttgcgacaaaatcccagaacgtatcatgagccgtcgcagcctgcggcatttcattgtgcggttccggttttatggcgtgaacgagatccgggaatttgatcgcgtcctgaatgaagaacaccggaatattgtttccgacgaggtcatagttcccttcttcagtataaaacttcgtcgcaaatcccctggcgtcacggacggtgtcagctgaccccttggagcccgccactgttgagaaacggacgaaaacaggtgttttgacggacgggtcctgcaaaaatttcgcccgtgtatattccgtcatcggttcgtacacctgaaaatgcccatgaacgccgtacccgcgtgcatgaacaacccgttccggaatccgctcgtggtcaaagtgcgtcattttttcacgaaaatgaaaatcctccatcagcgtggggccgcggacgcccgcttttaaggaatgctcatcctcagacacgcgaagcccctgattggtcgtcatttttttgccgctgttatcagatcggtactgctccagctgttcgtcctttgagtgttcatttactcgtttgttttgatcatcactcatgtcagttcccccttttaaaacgaaacattctacagcacatttacccgcggcgttctttaaataaactgctgatccgctcattaggattttaggtctgtatttacatatgcggtcatacacattttgaaataagccattttcacagaaacaaaatgtgaaagcgcttaccaaaacagctgttgaacaggggaggtcatatcatgcttgccatactcggttttgtgatgatgattgtttttatgtaccttattatgtctaaccggctttccgcacttattgctttgattgtcgttcctgttgtgtttgccctgatcagcggatttggcaaagatctcggcgggatgatgattcagggtgttacagacctcgctcctaccgggattatgctgttattcgccatcctgtatttcggcattatgatcgactcaggcctgtttgatcctctcattgccaaaatcttatcgtttgtcaaaggagacccgttaaaaatcgccgtaggcacagcggttctgacgatgaccatttcgctggacggagatgggacaacaacgtatatgattacgattgcggcaatgctgcccctttacaaacggctcggcatgaaccgtttggtgctggcggggattgcgatgctcggttcgggcgtcatgaatattattccgtggggcggaccgacggcgagggttttggcttccttgaaattggacacgtcagaagtttttacgccgctgattcccgctatgatcgccggcgttctctgggtgatcgccgttgcttatctccttggaaaaaaagaacggaagcgtctcggcatcatttcgattgaacacgcgccgtcttctgatccggaggcggcgccgctgaagcgtcccgctctccagtggtttaacctgctgctgactgtcgctctgatggccgcgctgatcaccagcctgcttcccatccctgttctttttatgatcgcgttcgccatcgccttgatgattaactatccaaatgtcaaagagcagcagaaacggatttcggcgcatgcgggtaatgcgttaaacgttgtctcaatggtgtttgcggcaggcatatttacaggcattctctcaggcacaaaaatggtcgatgcgatggcgcattctctcgtttccctcatccctgatgccatgggtccgcatctgccgttgatcacggcgattgccagcatgcctttcacctttttcatgtcgaatgacgccttttacttcggtgttcttcccatcatcgccgaagccgcttccgcttacggaatagacgccgctgaaatcggaagagcctccttgctgggacagccggtgcatctgctcagcccgcttgtgccatccacctatctattggtcggaatggcaggcgtcagctttggcgaccatcaaaaattcactattaaatgggccgtgggaacaacgattgtgatgacgattgcggcgcttttgattgggattatttcgttttaattaaaaaaggatttccgctggcggaaatccttttctgtacattatttttttgtatagcgcacccagtcataatgagcgtatagcggatttacaccattgtaggaaccgagccagtcatcgacacctatcccattccacaagttcatcatgatctttcccggtgttgtcgggatttggcttgtcgcagtatgttttaattgcccatcgacataccattttatagagttcggctgccaatcgaacgcatacgtatgataggcattggccgcgtcaaatccgagatccgcaaccttctcatggtttcccgcgccatttgtataataattaaattgaacctttgtcgtgtcttttcctaaaaattcgatatcaatctcatcccaaggggtaccatccgttggacctgtataagtgaagaacgatgaaacgatccccgtgtttttagccggtttcattctgacttcataaagtccatagccataggtttgagcggagcggttctccccgcagtcaaacttgttataagacgggcttgtcagcgccaaacgcatttcacctgatgacgtcacggatacattatttgcacgccaagtgcagttgaacatatctccattggagtaaccatttgctttttgccagaaaccggagttatagctgttaaaaggttcaaaaaacgatccgcctgtttgagctgatgcagcagaagtgatcgcacacaaactcaaaaacaatccagtgacaagaatgagcagcactcgtttcatacgataaaacatgtcggcattcccctttctttgagagcgatttctttatcgatcatacatgattctgttaaaagggaacatcggtcagaataatgataataacgaatcttaaaaaaacctaaattaccatcagcacaaacagaaatgatccgcgctcattgtaatttaggttttgcatgcttatcagcaacaatcctaacaagatcatatgtgaatgtaagaaaaaatgaatccaagaacaataatgccaacgctttcattatgcttgtttgactaccctttctatgtgaatcgttaaatacagcagctcgtcactggtgagcttgtgctcatacgccctctcaatgcaagtttggattttcttcgtgcattcatacgcccgacggtatttttctccagcaaaaagtcgatgtgtgccgttaaaaagacgctgcgcgaaaaactttaagtgggtgacaaaccgataatagtgaagcgattcttcgttgaattcaatcttaaaatggtattttacgatactcaaaatctcttgcatgacttttgtaatgctgatgatattgggcatctcctcattcagctcggcatttacaatatgcagcgcaataaaacctgcttcatcctccggcagagacacgccagtcttgttttttaccatgatcagcgattcttttccgattgcaaattcgtctttgtagagccgcttcgtttcccacagcaaggcgttttgatatccagccctttcttattgcgctgaatggcaaagtaatatggtcggtcagcgacacatagatgctgtcgttgagctttttgccaagctgtaatttcgcatagctgataatctcctcggatactttcatacactcgatcggaatatcatacaaaagggttttgaacttcggatacatctttgttatcgagggtgagcactttctcaatgcgggcttcatctgccggatctcccgttttcttttgaaaagcaatgccccggcccatgatgaccaattcctgattgccttctttgagcacactgacgacattattattattgactttcgcaatcttcaattccgtctccctcccgcctgaccatttacctgctacaccttgattgtacatcctttttgtaccaggtcaatatctccaggtcaatcagaaaacgccgttcagaaatcattgtccaacgatgaggcagaggcgcatataatgcagagaaccggtttttgggaaggagcgtgtgtgatgaaacggttttcgaaagaagaaagcagctggatgctgtatgattgggccaattcagcttattcggtcattattatgacggcggtgttccccttgttttttaaagcggcggcggcggaaaacggcgtcagcgcagctgattccaccgcttatttgggctatacgattgccgccgcgacttttattttggcgatgctcagccccgtcttaggaacgattgccgactacaaaggatgcaagaaacggttttttgccttcttttttctgatcggtgtggcgggcaccgccgcgctggctttgattcccggcgaatcttggatgctgttattaatttgttatacgatttccacgatcggctttgccggatctaatgtgttttatgatgcgtttctcgttgatgtggccgcaaaggagcggatgaatatggtgtccgccagggggtttgggctgggctatatcggcagtacaatcccttttctcctgagcattgccgtgattctgtcagcacaagcggaggtgattccgctgtccgcccagactgcgggccgcattgcctttttaattacggcggcatggtggggactgttttcgattccgctccttctccgcgtccgccagcgctattatatcgagagggagccgcggcttgtgatcagcagttttatacggctggccggcacgctgaagcagatcaggaagcaccgggcgctgtttttgtttctgctcgcctatttcttctatatcgacggggtcggcaccatcattacaatgtccacgtcatacggggctgacctcggcatcagcgcggcaaatctgctgattgttttatttgtcacacaggtcgtcgccgcccctttttcgattttgtacgagcggctggccgaacggtttaaaggaaaaacaatgctttatgccggaatcggcgtgtatatgattgtctgcacgtatgcttattttatggattccgcttttgatttctgggttttggctatgcttgtcgccacttcccaaggaggtattcaggcgctgagccgctcttactttgcaaagcttgtccccaaacagaacgccaatgagtttttcggattttataatatcttcggcaagttcgcttcgattatcggcccgcttttgattgccgtcaccgcccagctgaccggaaattcgtcagccgccgtgttcagcctgattttgttatttgtgatcggcattgccatccttgcgtttgtgcctgaggaaacggcgtaaaaaaagcctgcacgcggcaggctttctattttatttcttggctttatggactttcagttttttgcctttgaccgtcgtatttttcatgatgtcaagaacgtgcgggccttttccgttcagaatttcgacgtatgttgcgttgtccagaatcgtgataatcccgatatcatcggctgaaacgccgtcgattttcgcgatcgtcccgacaaaatcgaccgctctgagtttcttctttttcccgccgttaaagtacagtttcatgatgtctttgtttaactgttcgcttttgtctgttttgacatcggggcgggcgttcaatttttccgcaaaagccgctttccgttccgctgtttctttctcggacggcgcctcccgcttttggatgcggaaaccgatatatgtctcaatgtcattcagaaaccgcgattcagccggcgtcacaaacgtaacggcccgtccgcggtgtccggcgcggcccgttctgcctgtgcggtgcacatagctttctttttcaagcggaatatcataattgatgacgaggctgatgttttcgatatcaattcctctggcggcaacgtcggtcgcaatgagatagcggaactcgccgcgcttgaattcattcatgacgtcaaagcggtcttcctgcaccatgccgccgtgaattttatcacaagggtagcccagcctgtccagctcatcggttaactggatgaccctttcttttgtccggcagaatatgatgcagctgtccgggttttcggtgatcaggacatcacgcagcaaagatgatttatcctcttcttctgttctggtgacaaaatgctcaatgtcttttgtcgtcaggccttccgcttttacttcaatcaattcagggtctttcatatatgtgcggctcagcttctcgacgtcatccggcagcgtcgctgaaaacaacatggtgactctgtttttcggcagatgctgaatgatggcttccacctgttcaataaatcccatattcagcatttcatccgcttcgtcaatcaccacatacgccagccgttcaagcggcagcgtccctttttctatgtgatcaagcacacgtcccggcgttccggcaacgacgtggcttttttgcttcagttcggttttctgtttgtcaaaagaagcttttccgaaaaccgccgtggcttttatccgtttgaaacggccgatattcgtgatatcttctttaatctgcgccgcaagctcgcgggtcggcgttaaaatcagggcctgcggtttgttttcctcccactccgcaagctcgcagatcggaatgccgaaagccgcggttttgccgctgcccgtctgcgatttgacgacgaggtcttttttttgcagcgcggcggggatgacgcgccgctgcacttcagtcggctcggtgtattgcaagccattcagcgcccgtcggatctcggggctgatcgcatattcattaaactcattcatgactaaactccttctctgtccggctcccctcattatacgcgaaatgccgccgctttaccctgacgttttgccgggccgttcgggggactgctttttcttcatgtcgagcacgacccatttggcgcaataaaagctcatacttccttccccgtcatcgacatagtagcggatcgattcccagccgccgtcgactgggctgatatccagatggatgtcggtgatgctttcaagatcatccagccgggcagacctcacatcctcaaaccgcagcacggcatcatactgtccgtcagtcagcttcagctcaaacaccgggattttatcataatactcgttatacccggtatagaacgtaaactccgtcaattcaaaacaacccggcgaacctggccccggcagaactgctttctcatgtttgtgccattccattttgcgcctcctttttttcagctgaattgacatgtctgactcaaatgaatttttttcttacaaatccccatgaacttctttatattcctgcacccaatctcttaattcttctatcgtatgcagatacgcatcaggcgaatctttcagatcaaacccgctcaaatatacgagcatctcccaaacggtttcgtcctcatccgccggatcacctgcactcacatactcagacgcccaatccgacacttcttccctcgccgcttgaccgttcaggatcagaccagcctttttcagacattctgctcttgtgggttctttcacgtcaaaatcctgcctttcatttcttgtttaaaatgctgactaacagcctcctggcccgttcgtgccgcccgatttcctggctgagctccggataatccatcaaagcgtttttcagctgcgcatattgcggatacagctcaaaaaaggatttatataaggctttacgctgccgtgcaggcatttgtttattcgccaaaacaaaatctaagctgccgcagacaagtgcgaagtattcataaaaatccccagcgcaggcagcaccctcaaagtcttcttcgaatctccctgcatctgaaggcagcggcccctctaattcttttttgtgtaatttcaagcttctgatgacgtcattatttaaagaatatctgttggatcttaacatctcatttagccgctttcccattactgatatcccgcttataaatccctgaattcgagaccgcgtaaatggcatcgccagtcagcttcagctgatgcccggaaagctcatcgccatccgcatcacagcacgttatctcttgcatcggcagactgacatcggccggaatgagagacagtgaatgatcatctttgcatacccaaaacccgttatctgaaatcgctagctggtcgtaaaccccggaatatgctttatcagaaataatccacactcgtttcacgtcggtttcttcaaacgcagcaatgactgtataagcgtaatacagcatgtagattagtccgtctttttctgcaagtgcataacagtcatctaccgcgggcgcatatatttctgaaagctgctgatcaatgtgggttttctttagctgcccgtctaaagtgaagcacagcacactgtgcccttcaggattttcatcactataaataccttcatcacttaaaccgatccacaggttttgtttttcatccaaaagactgcatgaaacccctgaagggagagaaaatgcactttgttctgttccttctgctgaaaatactttcactttatactcatgcgattcaaagaaaatcaacacataccagtcagccgaactctgttggaacagcataatatcctcatacgggatttgttcatcgatatgaatcactcgcgtatcgcccgatttgtcgatgatcgtaaacgaaagcccgccattctgatgccgtccgagatacagacgcccgcagttatcaaaatgacaaaaacatccttttactgattcttcgactatcttattcatttttattttcatgtcattgccccttgagtcttggatggtatcctatttatatcgatcgttcactccgtaaaatgatatgcagatggctgtaaaaagccatctgcataggattgatcaatactttaccagatataaatcgttatcactaaagataaacatgcgatcctgtacggctctgtacgttgtttctccttttctatcaataccgtgtatcatgacgtcagtctctttgtgctcttcatgaaatgcaaatagggtatcatcgtgactctgaatcagcagcaccctttttttcgaaacggatagctgatcacaataggagtattgatcgccgtccagcacatattctgcaacagtacgaattctgtcccgtccaatctgataatgcccgatgacacagcaatcctctccctcgaaacatacatacaaatcagatttgatcgattgtacggcatagcattcgtgcatcatttctttaaaatcgtcttcaaaataaaacgttctgtcttctgcatgaaaagcaaatatcgcttttccttgaggatttctctcatcatacataccctcgtccgttaatccgatccataataatccatcctcacccagatgaaatacattggcgcttaatagaaaagaacaaatcggattgattttattactgtttacgcagtatgcagccaattgacacgtatgattctccaggtaaacgatcacgatagtgtcatcatacgaatcaatcagatagaaatgggcatcttcagaaaatccgtgtaactcttttttgattaaaagagagctgcctttcataacctccaatattactttgtgatcgtgcaccgacacaataaatacttgatcatcccgacccgcattgaaataaatgatattttccctttcatatgacccaacacgctccgcggtaagttttaacatcagcaacactccgttgaataggaacctgaaatttatattaaattaatcaatgatatataaatctgctgcatcgtattcaaaccaaatgattttttcattactttcagtagttacatcaaccttttgagtgttcaggttcatgcaggacttatttttggcagggtttgctattataacaacaaaatcattgatcgatgctaaaaaatataattcatctaataagtaatctgccatcaattcttctttggttaggacacattcaatatgaatgaactttttcgatacagtattcatatttatcattttcttttcaaccttcttcttccattcttcaataaaagaagggaatgccattacttctattagagctgtttcgaactctaagtcattcattaatttgagaaaaagtatctttactcactagatcacatgaataaatcgaattgtatttaagcggattaatcacatccagattccctatagccctcaatgattctttttgtaaatttaaaggagtgttcatgtttgcctccgcgaacgatttcgttatgtaagaaaagagaggctgggaacctctcttatttgtttatttatgatttcggatgatacgcataaaatgattggtcgtcaaagcgaactgtttcagcttctacagcaatcagcattctgttcatgtcaatgagaaaattagcatttgattgatactccggaattacagcatttgatagattaccgattccttccgggtggtaactcatctcaaatacttgccaattgtattcttccgaatctattttttctaatctcatatcaccaatatctgcactaaaataaacagatgctgcatttttaacaacctgaaccttaaaacaggtcttttttaaagaactgataatcgacctttaaaatattacatccctcgtcaatataatctactctattgttcaatttgtttgtgcattgtcttctccttctcctaactaacactaacaaacccattgatagaagtgtcttgatgataaacatagattattcaaacaagccccaaaaatatattactctgcatatttgtcattaaatatctgttgaatgcaaaaatactatctggagattatttgaaatcccgtttagaacaatcagatgatatcggtagtaggtattaaaaatatacttatttgtaatgtgccgtaagtgttttttcaaattcaactggaaccgtctgatttgggaatacaactgatatccaatctaagacaacgccatctaacgatctccaagttgctagttcttttccttcactctgatgatcaatacctagaatacagatttcaagttctctctcaccataaatcgcccactttaaagtcggtgaagcccaaacaacacgagatgcaatattcattatacagtcacttttactgtgctttggataatcagttaagagtgacagatactcatctgcagttatatgcaaagggatctttatccagttaaaatactcaaattcttcgtagaattggtttatatgttcagaactgtctataacagccattaatataaactcatcatgatgttcattagccaaactcttaaacattccccaactttcttcagataatacccaatggaattcctcgaataaataataatttttcctttgcttaaaaacttgtttaggcaatgtttgatctacgtgacataaggaattaattatggattgatagacttttaactccttaggatgatcaataaaatagtgatccatcttatttcccctttaatgtcgcattctgattttgtgtgtgaatttttttctacctttaggtgtatattccgcggttggatagggacttgacttagcatgtttccttagggaatacttattcccatttttcgtcatagtgataacaccccatgatgaactgattttctccatccttgtcttcttaaatttttttcaaaagttcttctttttacattagtagaataatttttgaacctagaagtttttccagttatatccctataacttgagtaggcccttctagcccgtacactttttctagatagtttatatgttttagcagctttataaatccgattagcacccttaaataacttcccaggaccaaagttcgaagccgctgcccaggctgcacctctccatcctttacctgatttatatgccttatatccgtcataagccgcaaagccggcgttaatggctagccacacccaatgcccatctggatcaacattcatcaccgggttgttgtttccgtatgcatatccattctgatctaaagaatccccatcgctgcccgggtctgggtctagtgataagaatacaccgtttcttggttcgtagtagcgggccatgagatagtacaggccggtttcttcgtcgtattggtagcctgcgtagcggtagcggttgtcttttacttcgtcgcttgcttcggtttttgtcggatttccccacgcatcgtactgatatttggcaacggtttttccggtgctgtctgagatggcgatgacgtcgccgtgtgcgttgtagtgatagaaatatttcttgccgttctctgtataggataacagctggccgctgtcaccgtacgtatatgattttgtgacgttgttgtcggcgtctgtttcatacagaacgttcaagctgtctccgtcatagaagtagttcgtaacgtttccgttgacggttttttggattctgtttcctttttcatcgtatttgtatgttgcgaacggcttgtcttcgccttttttcgtgacggcggtcaggttgtcttccgcgtcccacgtatatgtgtatttgccgtcagatatgcggttgccgtttttatcataggacaggtcttcgtcattcaccttcgtcagctggttcatgatattgaatgatgcgttgactgatttgcttgcgccgtcctttgtggtggtgacgtttgtccggttgccgaagccgtcgtacgtatattgaatgacggtgccgtcttcatgagtttctttgacgagctggttgagcttgccgtattcgtactgcacctttccgccggctgagctgtcgatgaccgtgcggttgccgttggcgtcgtattcatagctttcccggaagatgctgccgccgtttttcgctccgatatgaagagagctgacaagattccgctcatcatatgagaagctcgtgccgacttcatttccgctgatgaatgtctggacattgccgttttcatcataatcaaatgtataggctgaagtgccgtctttcatttcaatcatttgatcaagtttgttgtacgtaaagctgtttgttcctttttggccgccgtggctccatgagaaagttttcagcttatctgaatcagccggatacgtccagctttggctgccgccgcggtcggttaattcggtcaggcggtttttgttgtcaaaggtgcgttttttcgttgtattttgttctttgtttgtgaccgacgtttcattgccgtttttgtcataggtaaagttgtatttttcagtgccgttatacgcttttgacttaacccggtcggtgccgtcataggtcagcgacacttcattgccgttggcggaaacggttttcgtcaggttgctgttggcgtcatattcactcttcagtacattgccgagcgggtcggttgttttgacgagcttgcccatgacgtcatattcatattgataggtctggtttgcgccggcccgaatcgtttttgtcagctcatttccttccttgtcatagctgtgaaggatggatgtgccgtttgacagggtcagctttgtcagctggtcggcctgatcgtattcgtaggcggttgtttcgcctttcgcgtcggtttcagacattttcttgccagtctcgtcatatgaagcagtgcttgcataacctagttcgtcttcttcttttgtgacgtagtttcctttttcgtcataggtgtttttcgtcaggatgcttccttcgattaatcggatgtcatcaaaccacgccgttcctgtggcgcttttttggaacagaatgctgatttcgattttattgatcggctttgttttcggaatgactgccgccgcccggttccattcctgtgtcccctgcgggaatttggcggtgtagacgcccgtcgtgccgtccgcataggtgacgccggcctgaagcgcgtaatcattgtcgttcgttaattttacgccgtctgccttggacatccctgtcagcgtgatatataccggcttatcgtccgcgctttggcctaatgtgacggtttgttttgcggccgcattggcttgtgatgcatttgtgcgggacgcttttaatgagctgtcatcatcgaagccttcatcaaggtcagcggcggctccgcttgtgctccagccatctgctttagccgtgaaactgctgttttgaaccgggttatagcttgaagagacttcgcctttttccagctgaacctgatcaaaccacgcttttcctttgccgtccttgtctttatgatccacttccatatagacgatggcttttcctgcattggccggtgttgtaaaggtaatctgccgtttcgtccagtcattctttccggctaatgcgcctgattcattgtgaatccattgaatgcgtttttggtctttgtcacgcagatcaatgttgaaatacgctctcgcctttgtcagatccgttttgatctggccgctgagtgtatacgtcgtattcggctcaagctgcacttcctgcgttgcggacgcatggccgtgctctgttccggctgaagcggattgtgaggtgatctccagtgctttttgtccggacagcgcgccgcttcttgcttttacagacgcgatgcttccgctgtctctcgtagcggtgagattccagcccagctttgttgcttcaaagctgccgtctttcagcaggcttgccgaagctgccagctctttgcttgattgaatgagatttccatacttgtcatacacggcggcggatgaggattttccgctttgatccgtctcagaaacagcatcaagtccgtcgtacgcaatatcagtgacgttcccctcggtatccttcattttcgttacgtcattgtttttgttgtactgatacgtttcggtgccgtagttgtcttttacggctgtgacgttgccgtctttatcatattgatagctttctgtcgctttgcccgcatccgcgtcgttcggatcggtgtcctgaatgacgttgttgccttcgtatacagtgttggtcgtgattttcagcccttcggcatcatcgatcatctgaatcgggttgcccgcctcgttatagccgtactgcactttgcggccgttcggctgcgtcatgagcagcgtttttttgccggcgtcatagctgtaatcatacgtttcttttttcgcattaacggctttggccaggcggtgcccgctgtattggtattcagtgaacagcggtttgtcatccgtgctgtttgcggaatactgcttgacgaggcgcccttcggcatcatagtcgtagcttgtgacgctgccgtcagtatccgtcacctttttgagaaggtctttgtcatatgaatacgaaatctttttgtttttcggccctgtaagagatgtgacatggccgttttcatcataggtaaatgtcagcttgcgccctgatgcgtctgttatggcggtcagctgattgctgtcgttatattcgtatacggttgtgttgttgtgtccgtcaacgactttttgaagcttgccgccttttttgctgaaataagcgttcgtctgatcctttgtttttaatacaaattggtcgcttgtttctgtcagttcgagataaacacccgtcggcggctgatacgtgccgtcagattttttcgtgaagacatgtgttgtcgcgtcctcatcaatataaacggctctgccgtcttcagaaagaatcgacatttccgcatcggcataccagccttggccgaacatatggtcagagctgtcaaggctgttaaaggtccgggagagtccgagcccggcccgcgtccgtcgattgacatatcttcttcattgacgatgacatttcccgtcgcgccgttcagctgtccgtccggaatgtcgataatagaccagaattcttccgttccgaggaattccgcaccttcatggaaaacagggttaaaaggtgccgtcggtatactgtcaccatttgcgtcataggcggtcagcgtaaaggaatagttcttcttccctttgtaattgccgtttgcgttttcgtaaacaggtgaagggtcaagcgccagttcgccgccctttccgtccgtgtgaagctggaattttcccgctttcacttcatcggctgacggccagatgtgtttgttttgggtcgtccaatgatcggtatccccgacatcgaatgattgatagtcttttccgttgtagatgttgattttgtagcctttggcgtttttgactttatcccatatgagattgacataacccgtttggctcgatttcgtgttcgtatagacgtagcctgtcagatttttcggctttgcgatatcaggcagcgccggactagcttccggtgaggcgatcgcttctccgtctttgttataggcgattactttaaatccgtatgttttccggtttgcgtctccgccggcatttttataaacggggcccgggttgatcggcaattccgcgccttttttgtctttcaggtgaagcgcatattttccggcgctgatttccgcctttgtcggccagatgttttgattttttgtggaccaggatgttttatttccgaggtcaagcgtttcaaagcttttgccgttaaagacttgcattttatacccggctgcgcctgatacggctttccaggaaagatcaaaccagcctgtggcgttgttgttattaaagcctttcgtgcttggtttctgaactctgccaatattcggaatgacgggcttggcggccgcagacatggcgccttctccctggtcaaacaccgcgctgaccgcgacccagtaatttttacttgccggatagctgccgccggagtttttatagaccggcgaaggattaagcgctaattcacttccgccttttccgtctgtatgcagcttatatttgccggagtcgatttctgcttttgtcggccagatgttttttccttttgtgctccaagaggttgcattgccgacagaaatggcttgatattctttcccgttataaagccacactttatagcttttggcgccttcagcttttttccagctgatattgaaaagtcctgtcgaatctccgttatgatacgctttgacagacggcgtgtccgccttcggaatcgtgtatgtcacttcaatgtatggttttttagcagagtttgctgatgacatcagcttcttccaatattcttttccgttgccgtttgtgtgaagcttaaagccgtaattggcgccgccgctgttccacgacttgactgcggatgtgacatcgaagcttgcccattggcctttatagacctcggctttgccgatgtttttggagcccggcttgtttttccacgtgatcttggcattgtcgtaattgctgtttacggtgtcgagccaaagccccgtcgcctttgatccgtaataggagtgggctgtgtatgctttaagcgtcgcttttgtcaccgtcatgtttttgatcggctttagattatcaaacttcataaatgcgtagttcgttccggttgtgccgtcataataacctgttttcagcacgtacgctttcaatccggcctcccatttctgcgacgcggcagagtagtttgtcgtcgggtacgcactcatgacaaaggtatcggatgacacggatactgatgtggaaggatcaatagataccggataaacccgcttgggatctttcagccatttttcatcggccgttacatgcagcaagtagccttcgctgtttttttcaagcttgaagctgacatcttctgacctgctgacctcacctgacttctcgtcgagatctgagtcggtcataaaaggcttcggcacggtgtagacgacattgtctttgtcatcagaaaacgcgatcgagccgtcttcctgttctttagcctgaaggtcggttttgatttgaaaggtgaaggaattgtagccttcatatttgtgaagcacaaggtcttcttttatgttttcgttaaatgtgtaggtttgtaaatcaatagcaggaaacacttgctgatacgtaagctcgttgctgtcttccttcacttttgctgaggcatctgtcggagtgattgcagcctgatcggggccttttgcgccggttaatgagtatgtgagcttatgatcaccgtgttcaaatgtagcgtataatccgtttttcatttgcttcagaaaatcggagttcagcactgtattttccgtcccgacatcctttgagccggttttcaattcaggagaaatgtcttcccagtccgcattggcggtttctttcgtatgaatggggtctgtgtagatttcctgtttgtatacaccctcgccctcataataaagttttgaattctcagttctttcagacgtgatctcaccgtcttgattgatatctttttgatcaaacggcatctgctcggatgctttttccgccggaagatctttttccgggtctgctgccggaatggcggcggttttcgcttgatcttgtttttcacgcgtttctgccgcaaatacatcggcaggcgcaatggaaatcataagcgttgccgcaagagtgccggccagccattttttccacttgttcttttttcctattttcataggttctcctccttcttttgtaatataggcttaacaatagtaatattattgaaattgtttatcaatattttcctaggtatttaaggttattttaaggattataggaattttgaaccttttattcatataaaaaaaccgccggctgccggcggttttttgtattatggatagcggagatttgtattttgcgctcccgcgtaggattgggcgaagtttttggcgtcctgggctgaaagcgtgccgtagctgtaatttgatctcggattccagccggtgcgcggtgatttcggggctttgagcgacgggaatgaaccggtgtcggtgaattgggcggtcccgtagtcgtctatcattccgcctttttcatttccgttaccgaaatagttggcttctgagaagacagtcgcgtttgtatgaatggtgaatcctaaattgaaattggtcacatagttgtttttcgcgtgaaaatagccgtatctcatcaggcccggtgaacgcacatagacgttattaaaatagttgttggtgatcgtcatatgcggatagccgatataattgcgtccttcgttatcatcattcggataaccgagaatcaggccgtacagatggtctgtgaatttagagttagacagcgtcacaaaatccgctttggcgccgacatacagaagctttcccaaatcgctgtggctgttcggattgtagctgtgtccttcaaaccacacgtggtcaatccagtaattctgcccgttcgctatgtacatcggaatgtcgttgttgcctgtaatggcggcattatggctgataatgagatttttgaaaatcacattgtttgatccggagccggtggtcagatagatgttggtcagcctgtggctggtataagagccgacgatggttttattggcgccgactgtcacaacggctttccccggggaagaaatatcacttgtgatgacgatggttttgcggtccgttccgcccgcattgtttttcagatcattgagattgctgacgtagacgacggggccgccctggcctcccgatacggcggattttgcttttccgttatgatccttcgcattgccagcgaatccggtaagtccctgcatcacatccggataagccgctgccgcttctgcctgcttggatgcggaacatacgatggccagacaaagcgcaaagccgagtgcagccaagaaagcgagatgacgcgtcttctttttcatgcccttcactcctttaatctcttaaattgcaaacacatgaagtattatacaattactatcctctttttccatgatctgtttgtctgctttttcgttatggctgaaaagccccaaaacaaaaaaagcagccgatacggccgcctatatacgggtgctgtctgcctgagtttccgccggcacggctttttgctttcgaatcagggacagtgccattcccgcaaaaatcaacacaatccccaaagattgataaaggtcggggcgaaaccccgtaaatacggtgtcaagcacaatcgccaccgccggatcaagaaatacgatgattgatataaaccgggtggataaaaaccgcaagctgtcaaaaaagagcaaatacacaattcccgtatgaatgataccggttgacacaatcatgatccagttcacatgcgacaaatcagaaaaagcgccgaaacggacgaacgggagaagaatgataacgcccaacccggtctgcaaacaggtgaccgcatatgggctgagactgttgatacctttcccggccagtgtcgtaaaggcgtaaaaaagggcggccagcacggcccaaataatacccgatcccatcagctgagaaaatgacgtatttccgttgatgccggaaatcagggcggtgcccagaaaacaaatcacgatggaagtgacggacacaatatgcagtttctcccggtatataaggctccctagaagaaggacgagaaccggagccagatgataaacggaaatggctatcgtcactgatgtctcctcaaacgatttaaataaaaacacccagttcagcacgagaaaaaatccgcaggccaatgtctgcaacacctcgcgccggttccattgttcggtgcggtgccgtccggaaccaaaccagcaaacgcccagaaacaaagaggcgcacagacatctcacaaagaccagttcaattgaaggaacattcgtatgttccgagaaaaagccgattgatccgaaaatgaccatggaaatgaccattttgatgacggcatttgatgtttgttcagcttgcattgatttgcttcccccatatcattgactgtttattcagacaaatactaacagccattttacttgattcagaggaagatttcatcctatttttcgaaagacggcggtcttttctcattaaaaaaagccccgcatcagcagggtcttctgtttaatgaacgatcagtacaggacaaggagacaattgtgagaccttatggctcacgcttccgagcatcatttctttaaatccgctgattccgcggcttccgacgacaatcagattgaaatgctgttctttcgctatgtttaaaatttgatgcgcaggttcgccttggacgtacaggctttccgcgtttaccccgctttcagccgctttctgcttggcattttccagaatggccgctcctttttgctcgacttcatgtttgatgtcttcaatgaagttttccggaacatagacaatccctgttaaggctgatgtggagacaacggcttcacgtcccgcataaagaatggtgagttcagcctgctgttctttcgccagatggatcgctgcgtccaaagctttgctgctcatgtctgaaccgtctactgctgcaagaatttttttaaacatatgaatcccgcctttctgcttttattgtcctcctctctttgctgaatgtcaattttgccggctttctccggaacattgcgcttacagactttctccgtttgtggcgatgacgtctttataccaaaccaaactacctcagcgttattttttaagcgcttaataaataggactttattctcttctttttcagtattacctattggtaaaagtagtgataaaatggaattattgatataaaaaaggagattatgatgagaaatcatagaggcttccatgaggaaattcagcaacaacaaaaactttatccaacatcacatcgcattcaaccggtcagcccaaaagaatatgcagaagttttgactttacatacggcaaaacaactgagcgagacatttcaaacacttgtggatcaagatcaatatgaacaagcgattcagctgagcgagaaggtcgcctctcagcttggaaaacatacgaatttttcattgccactttccacagtgctttatagtttaaatgaaatggaacttcctatttcagaggaattttctctacatcgtctgaaactgctaggaaatcatcaaactcatgagaactttttcaaagcaataaaacacgaaatgttaacggcggatcgggtagactttatggttagtttcacaaggtggtctggtgttcagcttttgatccctccgcttcaggagcttgctaaaagacatgtccctgtacgcatcattacatctacctatatgggtattacagaaccgaaggcgttaagacatcttcttcaatttgaaaatgttgagttgagaattgtaaatgaatataaaaaatctttccatacgaaagcatacttatttgaacgctgttctggacagcatagtgtcattgtaggatcttcaaatctatcacaagctgcccttacgactgggtatgagttaaatgtgagactacctgaaaccagatatctccccgtttatcaacaaacaaaagatttgtttgacactgtttggaatgaaaagacacagcctgttgacgaacaatttttacaagcctatgaggaattccaagctggaagccaaaaggtaagtgcttcctttgctgctcaaaactctctttacaaaacgaaaatgtccccgaatgccatgcaaaaggaagcattacgaaaccttaaaaaaacaagaaacgaaggggagacaaaagcagtcatcatcgccgccactggaaccggaaaaacatttttagcagcatttgattttgagcaatttaaaccaaataaatatctttttcttgcccaccgggaagagttactttcaaaagcaatcgaaacattcaagaaagtcacaaataatcatgaagattttggcttattgactggcacgaaaaaagaaagagataagcgttttttatttagcactatacaaacgttacataaaaaagatactttggaatctttttcaacagatgagtttgactacattgtgattgatgaattccatcatgcagaagcatctacctatcaagctgtattaaactactttacaccaaagtttttattaggtttaactgcaacaccagagcgtcttgacggtaaagatgtgcttcagatttgtgatcataatgttgtttatgaactcagactccgcgatgccctaaaggcagagctacttgcgccatttcactattttggaatttcagatcatactgtagattacgaaaaagtaaaagtgaaaaacggactgtacgaagagaaatcgctagtcaatcatttaaaaacgcataaacgagtagaatatatcatcaagatgatcaacatgtatggattccacggcgagaaaatggttggcttaggtttctgtacaaacgtcgaacacgcaatatacatgagtgatgaatttaataaattgggtttttatacaacttatttaacaggaaatgattctcctgcaaaaagacaagaggtcattcgtcaattagaggacccgcaccacagtttagaacttatatttacagtagatattttcaacgaaggaatagatatcccaaagctcaatctactattgttccttagaccaacggaatcaccaacgattttcattcagcaattaggacggggacttagaaaaactgacgacaaagagtttgtaacgatactggattttatcggaaactatcaaaagtcattcgttattccactcgcactatctggacaaacaagccaaaaatcttttgataaagattccctccgagtggccgtgacgcatgagttttcagatttacctggaggatcttatgttgacctttcagccataacgaagaaagaaattttaaataagatcgatcacattaaactaaattcagatgccatgctgaaaacgttatacaagcaatttaaacaagagctagggcgctctccagaattaattgattttctatactctgaacaggcacctgggcttaccttttttataaagaaatacaaatcgtgggtacagaccaaaaagaaaatggacgatttgaatgttacagatgaagggattctcaataaccccttggttgtagggatagtagcaagattagaacagcaattacctattaaatggccttatgaatggttaattttacagagcggttttcacaaaaatatcatcacaatagaagatgtaaaagaatcgttagaaaaacagtttcatattcaaatcacaacagatacacatgatgacctcattcagcgagcaatggagcgtttaacgaaatcagatcaaaaacagaattggcgctttggtacattacaaggtgatacattcaagttagatccagaagtaagcgagattttaaccgatccattattcggaccgtatattaaggagcgcgtccactatggactgattgaatttagacgtatgaacaatatagaagcccttgcttcaaaagagattaagctaacattgtatcagacctatacaagaaatgagctcatttatctttttcagtcaactgatcaggaagggacttggcgagagggtgtacgtagagttaaaaatcactatttaatctttatcaatttgaataagtcagaaaaagtagaagatcatttgctatataaagattattttattgatcctagccattttcactggcaaagtcaaaaccaaacctcacatatatcaagcgtagggcaaaactttattcaccataaggaaaaaggataccatattcatttatttgtgaggaaattcactgaaatgcacaacatcactttaccatttatttatttaggagaagcggattacgtatcaagccacggagacaagccaatgaatgtcaaatggaagctccatcagcctgtcccagaaaacttgtatgtggatttaacgaattaaagcagatacggtcggaagatcagcgggtgcccactctagtgattctagctcacgaataggcacccatctgaattccgcatgctcttttgctaccggcttccctgatacaatcctcgcttttattgaaattaaattgacgatgaccttctcatattcatgatgaatatcagctatcacatcgcccgtaacaattttacaatcaagttcctcttcaatttctcttacaagtgcttcccgagcattctccccttcttcaagctttccaccaggaaactcccacagattaggaagagacattgttggagaacgtagagcacatagaatttcattgttttcattttgtataactgcggcggctacttttattgtttttttcaaaattaaacttcctttcgttttttcttaggtatgtattcatatttttgttatcaattttatactgttcactgtaaacgatagaggttgagtccatcataattcaaatggtttattaaaagcaatagaaggtcattctcctaattagcaagaaaaaagcaccctccaaactggagtaggtgctttttcacttcactccccaaacagcctccccatcaccgctcagcacactaaacgtcacaacttctttctctctcgctgagtcccattctttcaggaagacaccgtcataatgtgtgccgttcaggttgattcgggctttgctgctgttcgttattgtccaggttccggtcatttccccggaaatggtgccgtcgttgttaagccggatggtttttggggttttgatcgtagctgtaatgtcttttccatgctggatgagtttgtaggctccggatgcggcggctgccgatatgtgtgtatccggttctcctgcgtagcggtacggcgctgcaacgggccatccgtctttgttcatgtacagccgatgcactctgacttcgtgctcttcgcctctgttcgggaaacgggtgtggaaaatgaggtatgatcgtttcgttttcccgtcgtaaaacacggagttgtgtcccggtgaaacgtagcccgtgcctttttcagattgtgaggcgaagctgtagccgcccatgagtttgaccccgtacggttcaattgctttgtcatcgaagaaactgccgtcttttcctttggcgtcaagcatgttatggcctgcggcgtcatagtacggaccgtccggatttttagagcgcgccacacgcatattgtagccgccggctgtgtcaagtccgccgaatgacagatacagatagtaatatttcgtttccggattgtagctgatgtacgggccttcgattctgctgtgatttccgccgagcagtttttttccgtagccttggttcgggagcgggaaaccggttttcggattcatttccagtataaaaatccccccggagtaagagccgtacaccatccagagcttgcctttatggtcaaaaaacgtttgcggatctacgacgttcgggtgaacgtttgcatgatacgtcgtgccgtcttcgctttttccttccatgcctgatttcaaaaagatgcctttgtttttgtagggtccttcgattttgtcactcacggcgacaccgagagcggatcgcggcgagtctcctttacaggcgttatagtacatgtaatatttcccgtcagccagctgagccacatccggcgcccacagcgtatcagactgggcccagtcgaatgtctcttttaattcggagtagacgttcgggatcaggggattattgggattgacgcttgaagacagttgctgccactgcatcaggtttttcgacttggcggaagccaaatgcgagccgaatacatagtatgtatcgcctgttttgatgacggacggatcatgcacgctgacctctgaaaaaacgggatgctgggcttttgcctgcggcagagtgaacccgataaccgctgctgagaccaggcacacacgaaagaaactggttttcattttctgaaatctcctcgctctcttcttttcttaaaacgctttcaagacaacgctctattttatgacgcggatggcggaaatatgtgatcaacagcgccggcttcccgatgtaccgctttaatacaatagcaatctgatttgtgaaagactggaaaaaaagttttgacttctgattcgcaaacacttaatataaaaaacagttactagttatcagaatatttaagaattgagtgaagcatatatgaccttacacaaagaccgccgcatcgggcgattgtccgtccttcttctgcttcatgagactgaagaaaaccagcagatcagccggctggaacgggacggctggaaagtctgtctcggcagggtgggttcaatggatgcgcataaggtggtagctgcaattgaaaccgcttccaaaaagagcggcgtcattcaatctgagggttatcgcgaatcacatgcgctgtatcatgccacaatggaagctttgcacggagtgacgcggggcgaaatgctgcttggctcgctgcttcgtaccgtgggcctgaagtttgccgtcttgcggggaaatccgtatgaaagcgaggcggaaggcgattggatcgccgtttccctttacggcacgatcggagctccgattaaggggcttgagcacgaaacattcggagtcggaattaatcacatatgaatcagcccatagatatcagatgatagggggctatgcgtgaaatatcattttcatggcatagctcctttttgtatgggcgctttaccaaagtaaagaaaaaggggttgaaatgatggtaacgttagacggttcctcactgacaaccgcagatgcccagcgtgtgctgtttgattttgaagaggttcaagcatctgccgaaagcatggaacgtgtgaaaaaaagcagggcggcggttgaacggatcgttcaagaagagaagaccatttacgggattacgacggggttcggcaagttcagcgatgtgctgattcaaaaagaagacgccgcggatctgcagctgaatctgattctttctcacgcgtgcggcgtcggtgatccgtttccggaatctgtatcgcgggccatgctgcttttgcgcgccaatgccctgctgaaaggcttttccggcgtacggactgagctgattgatcaactgctcgcgtttctcaatcatcgcattcacccggtcatcccgcagcaagggtcactgggggcgagcggagatttggcgccgctttctcatctcgcactggcgcttatcgggcaaggcgaagtcttttacgaaggggcccggatgccggcagctcatgctttggaaaagacaaaccttcagccggccgtcctgacctctaaggaagggctcgcgctgatcaacggaacgcaggccatgaccgcgatgggactgatcgcttacctcgaggccgaaaagctggcctatcagtcggaacggatcgcgagcttaacgatcgaaggccttcagggcattatcgatgcgttcgacgaggacattcatgccgcccgcggatatcaggaacagatggatgtcgcagagcgaatccgctattacttgtcagacagcaagctgacgaccgtccaaggggagctgcgtgtccaggacgcctattcgatccgctgtattcctcaagtccacggcgcatcatggcagacattagcgtatgtaaaagaaaaattagaaattgagatgaatgccgcgacagataacccgctcattttcgaagacggcgccaaaatcatctcaggcggaaactttcacggacagccgatcgcctttgccatggattttctcaaagtggcggcggccgagcttgcgaatatttctgaacgccgtatcgaacggcttgtgaatccgcagctgaatgacctgccgccctttctgagccctcagcccggcttacaatccggagcgatgatcatgcaatatgcggcggcctccctcgtgtcagaaaataaaaccctggcccatcccgccagtgtcgattccattccttcatcggcaaaccaggaggatcacgtcagcatgggaaccatcgcctcaaggcacgcctaccagatcatcgcgaatacgagacgggtgcttgccgttgaagccatttgcgcgctgcaggccgtggaataccggggtgcggaacattgcgcctcgtacacaaaacagctctatctcgaaatgagaaacatcgtgccgtccatacaagaagaccgcgtgttttcttatgacatcgaacatctgagtgactggctgaagaaggagtcttttctgccgaatgagcatcaccaaaaactgatgaccaatgaaggaggacttacaagatgactgatgtaaagaaatcaatccgcgccggccgcggcaccgaacttgaatgcttaggatgggagcaggaagccgtgctccgcatgctccgaaacaaccttgacccggaggttgccgaaaagccggaggatctgatcgtatacggcggcataggcaaggccgcgcgaaactgggatgcttttcacgcgattgagcgctccctcaaaacgttaaaagatgatgaaacactgctgatccaatccggaaaaccggtcggactgttccgcacgcacagccgcgcgccccgcgtcctgctggctaattcggtcctcgtgccgaaatgggcggattgggagcatttccatgaccttgagaaaaaaggactgatgatgtacgggcaaatgaccgccggcagctggatttatatcggttcacaaggtattttgcaaggcacctatgaaacctttgcggagcttgcgagacagcatttcggcggcagtctgaaaggaacccttacgctgacggccggacttggcggaatgggaggcgcccagccgctgtccgtcacgatgaatgatggcgtcgtcatcgccgttgaagcggatgaaacacggattgataaacggatagaaacaaactattgcgaccggaaaaccgcatcaattgacgaagcgctgcgctgggccgaaacagccagacaagccggagaacctttatcgatcggccttctcggcaatgcggcagaggtgcatcatgagcttttgaaccgcggcgtccatattgacatcgtgaccgatcagacttccgctcacgacccgctgatcggctatattccggcaggatactcacttgaggaggccgaccgcctgcgccgggatcagcctgatttatacgtaaggctttccaagcagagtatgaaaaagcatgtggaagccatgctcgccttcaagaaaaaaggggctatcgtctttgattacggcaacaacatccgccaggctgccaaagatgagggtctcgccgatgcttttgattttccgggattcgttccggcctacatccggcctttattttgtgaaggaaaagggccgttccgctgggctgcgctgtccggtgaccctgaagatatataccgcacggacgctttattaaaagagctgtttccagaaaatcaagccctccaccgctggattgacatggcgcagaaaaaagtcacgttccaaggcctgccgtcccgtatttgctggctcggctacggtgaacgggaaaagatggggctcgccatcaatgaattggtcagaaacggcgagctgaaagccccgatcgtcatcggaagagaccatttagactgcggatctgtcgcctctccgaatcgggaaacagaagcgatgaaagacggaagcgacgcggtcggcgattgggcggtgctgaacgcgctgatcaacacggcctcaggcgcaagctgggtttcttttcaccacggcgggggcgtcggcatggggtattcccttcacgcgggaatggtcgcggtcgctgacggcagcatccttgcggaacaacggctttcccgcgttctgacaagcgatccgggtatgggcatcatccgccatgcggacgcaggttatgaaaaagcggttcaagtcgccgaggaacaagacattatgataccgatgaaaaaggagcggtaacatgccgaaacaaatagataccatactcaccaacatcggccagctgctgacgatggaatccggcggcccccgatccggcgggagcatgcaggatcttcatgtcacggaaaatgccgtcatcggcgttcacgacgggcgcattgtttttgccggacatcaaggagcggagaaaggatacgaggcaggagacattatcgactgcgggggacggctcgtcacccccggcctcgtcgatccccacacccatcttgtattcggagggtcccgcgaaaaagaactgaatttaaaaattcagggcatgtcttatttggatattctggcgcaaggcggcggtattttgtcaacggtcaaagacacgaaagccgcctccgaagaagaactgattgaaaaagggctttttcacctcggacgcatgctgtcatacggcatcacgaccgcggaagtaaaaagcgggtacggactcgacaaagacacggagctgaaacagctgaccgcggcgaaaaaactgggtgagcgccagccggtcgaccttgtcacgacctttatgggagcacacgccattccgcctgagtaccggaacagccctgacgaatttctgaatcgcatgctgcagcttttgcctgacataaaagaaaaaggccttgcgcaatttgccgatattttcacagaaacaggcgtctttaccgtcagccagtcacgggactacctgaaaaaggcggctgaagctggtttcggcctgaaaatccatgctgatgagattgacccgctcggcggcgcggaattggcggcagagctgcatgctgtttctgccgatcatttggtgggggcatctgacgaaggcatcgaaaagcttgcggagtccggaacgatcgccgtcctgctgccgggcacgactttctatctcggaaaacacacttatgcgagagcccgggagatgattgatgcgggcgtacgggtcagtttggcgactgacttcaacccgggcagctcaccgacggaaaatctccagctcattatgtcaattgccgcgcttcatttaaaaatgaccgcagaagaaatctggcacgctgtcaccgttaacgctgcgtatgcgatcggaaaaggcgaagaggccggacaaatcaaagccggacgggcggctgacattgtcatttgggaagcgccgaattacatgtatatcccgtatcattacggcgtcaatcatgtccgccgtgtcatcaagaacgggaagacggtcgtttcaagggagggagccgctcttggataagtatccgtttctgcaaaaagccggctccctcttcaacgaccgccatgtgacaaggatcggcgatgtgacggaagcgtgggcgggacaaacgatcaaagggccggctttgatcggcgttccgctttctaagtcgtcaatcagccattccggcgcctgctttgcccccggtgcgatccgccgggcgctcggcggcatttccgcatattccgcggagctgcgggagcatgtcattgaccatctgtacgatatcggcgatattcagattcacgtcacggatgtcgtcaaatctcacgaacacatttatcggaccatttatgatattctgacggaccagcctgactgggtgcccgtcattctcggcggcgacaactccatcagttattccaccattaaagccattgcggaaacgaaaggaacaacggccgtctttcaattcgacgcccaccacgacgtccgcaacacagaagacggagggccgacaaacggcacgccattccgccgtctgttagatgaaaatatcataagcggacaaaacctgattcagcttggaatcagggagttcagcaacagcctggcatatgaaaaatatgtaaaagagcgtcaggcagacgtgcatacaatggagatgatccgggagaaagggcttctccgaacgatacaagacactttgccggccgttcaaaaaagagccgacgccatttttatttcggttgatatggatgtgctggatcaagctcatgcgcccggctgtcctgcgatcggccccggaggcctgtataccgaggaactgcttcaggcggtccggtttttagcccaggaggctgacatctcgggtattgagatcgttgaggttgatccgacacttgattttcgcgatatgacaagccgggcagccgcacacgtcattttacatgcattgaagggatttaaattgtcacgttaaagtcaaatccggcacgcgtgatctcggctgccggaagattctcatgccacgcaaaaagggggagatcacgatggatgttgatcaaggcggcaatcaactaaagcgcacgatgaaaagcaggcacttatttatgatttcattgggaggggtcatcggcacggggctgtttttgagcacagggtatacattgagccaggccgggccgggcgggacgatcgccgcttacctgatcggcggcttgatgatgtatcttgtcatgcagtgtctcggagaattgtcagtagccatgcctgtgaccggttcatttcaaacgtatgcgacaacgtttatcgggccgtccacgggttttatggtcggtatcatgtattgggtgaattgggtggtgacggtaggatcggagtttacagcttccggtatcctcatgcagcgctggtttccccacagcagcgtctggatgtggagcgcgattttcgcggctctcctttttgccgccaatgcattctccgttaaattgtttgcagaaacagagttttggttttccagcgtcaaaatcgtcaccatccttttatttatcatcttaggcggcgccgcgatgttcggtttgatttcattgcacggttcgggtgaagctccgatgctgtcgaatttcacctcacacggcggactgtttccgaacggctttcttgcggttttcatcgcaatgatttccgtaagcttcgccttttcagggacggagctgatcggaattacagcgggtgaaaccgccaatccggcaaaagatattccgcgttcgatccgaaatgtcgcctggagaacggtcatcttttttatcggcgccatttttgtgctgtccggactgatctcctggaaggaagccggtgtgattgaaagtccgtttgtcgcggtcttttcccagatcggtatcccatacgccgcagatatcatgaacttcgtgattttaacggctttgctttcggtcgccaactccggactgtatgcttccacccggatgctgtggtctcttgcgaatgaaaacatgatcagcgcccggttcaaaaaagtcacgccgaaaggcattccgctgaatgctctgctcgccagcatggccgtttcctgcatatccttgatctcaagcatcgccgccccgggcacggtctacgtggtgctcgtggcaatagccggatttgccggcgtcgtggtgtggatgagcatcgccctgtctcagctgttatttcgaaaacattatgtgaaaaacggcggacgcgtcgcggatctgaccttccgcacgccgttataccctctcgttccgatcgccgctgtgatcttatgtttcgcttcatgcgtaggccttgcatttgatcccaatcaaagaatcgccctcttctgcggaattccttgtatgatcctgtgctatctcattcgttttttgagaaagaaacagccgaaacaatccgtccgtgacattcatttggataaaaccatgccataaaaaaaaaggcacatactgatgaggtatgtgccttttttgtcttattccgtaatcagcgtatgaatcagtttcggcgcttccgctttttctgagatgcggatgttgtcatagactttggcggtcacgtcgtcaacgttttcgcggttggcgtaaagggtgacgagcggctcacctttttcgacgttgtcaccgacttttttgcggagcataataccgacggcaaggtcgatttcgtcctcttttgtcgcacgtcccgcgcctaacagcatcgctgcgacgccgatttcgtcagcgacgatttctgaaacgacacccgcttcttttgccggaacgtcaattttgtacgccgcctgcggaagtttggacggatcgtcaacgacagaagcgtctcctccctgattgctcaggaactctttgaacttttcaagcgctttgccgtttttcatgacttcctgaagcttcgttctcgcttcttccaatgtctcagcttttttcgccaatacgaccatttggctgccgagcgtgaggacgagttcgtttaagtcttcaggcccttcccctcttaacgtatcaatggcttcttgcacttccagagcattcccgatcgcaaaaccgagcggctgcgacatgtcagaaatcacggccatcgtctggcggccgacgttgtttccgatgcgaaccattgctttggcgaggttcacggcgtcttcatccgttttcataaacgcgccggctcccgttttgacgtcaagcacgatggcatctgctccggcggcgatttttttactcataattgagcttgcgatcagcgggatggaattcaccgtacccgttacatcacgcagcgcatacagctttttatcggcaggggtcaaattgccgctttgtccgatgacggctaccttgtcgcggttcacaagcttgatgaattcatcttttgacaattccacgtggaagccttcgatcgcttccagcttatcaatggttcccccgtatgcccaaggccgcggccggacattttagcgacgggaacgccgagcgccgcgacgagcggagcgagtacgagagttgtcgtgtcgccaaccccgcccgtagagtgcttgtcgaccttaatgccttcaatggcggagaggtcaatcgtttcccctgaattgaccatcgccattgtcagatcggcgcgctcctgatccgtcatatcctgaaagtaaatcgccatagccagcgcgcttgcctggtaatcagggatgcttccgtccgtgtatccttttacgaaaaattgaatttcttctgttgtcagttcttttccattttgtttttttacaataagatctaccattctcatgatctatcacctgtccttcatttatgttcagtgaatcaatccgacgatcgccgctgtcaggaaactgacgagcgttgcgccgtacagcagcttcagcccgaaccgcgcgacgacgtttccttgtttttcatgcagccctttcaccgcaccggtaatgattccgatagaggagaaattcgcgaatgagacaaggaatacagataccactgcctgtgtatgcgcgctgaaatggaaatcgccggatgagagcgtctgcatcgccacaaattcattcgataccattttcgtcgccataatgcttccggcgctcaccgcttcattccacggaataccggttaaaaacgcaaacggcgcgaatacatatccgagcagcgcctggaatgtaatgccgaagaccgcgttaaaaacgccgttgaccagggcaatgagtgcgacaaatccgatcagcattgccgctacgacgacggcgactctgaatccatccattatatactcaccgagcacttcaaaaaaggattgcttttcttcttcaggaacgaagatcaaatcctcttctttgctgacggtgtacgggttgatgatagaagcgatgataaatccgccgaataagttcagcacaagcgccgtcacgacgtattcaggcttcagcatcatcatgtaagaaccgacgatcgacattgagaccgtcgacattgcggacgcgcaaagcgtgtataagcgctgttcagtaagatagccgagctgttttttcaaactgataaagacttctgattgccctaaaatcgcggatgcgacagcgttgtaagattcgattttccccattccgttcaccttgcttaacgcaagaccgatatacttcgtgatgaagggaaggaccttccaatgctgcagaattccgattaaagcggatataaagacgatcggcagaagcacgctcatgaagaacgtcgtctgtttcgcattcacaagcccgccgaatacaaagttaatcccttctgatgcatattccagcaagtagttaaatccttttgcaaaaccgccgacaagaaaattcccgataccggtgttgaggagaatataaccgagaatcagctgcagcacgagcatgacggcgatcggccggattctgattctttttttgccgttgctggcaagccaggcaagacctaaaaacacaatgattccgataattccgatgagatacttcatatgtgttctccttttatttgtattcgcttacaattttttatgcatcaacaaagaaagaggatggcggaagctttcggcttccgcaatgctgattaatagtcgctgctgccgctgtctccgccgctcacgatagagacgcccgcacttgcgccgatccggctcgcgcccgcagcgatcatgctgtcaacatcagcttttgttctgatgccgcctgatgctttgaccccgatgtccggtccgactgtttttctcatgagagcgatatcttcagccgttgccccgcctgtagaaaaaccggtagacgttttgacgaaatcagcgcctgcggataccgccaagcggcacgcacgctctttttcttcatctgtcaaaaggcatgtttcgatgatcactttgacgagcgcttttttatcagctgcttcaactaccgcgcggatatcagcttcaaccgctccatcatcgccgtcttttaatgcgccgatattgatgaccatgtcaacctcagtggctccttttgagatggcatccttcgtttcaaatgcttttgtttccgatgtcgttgcgccgagaggaaatccgataacggtgcaaacgtcaactcccgtgcctttcagttcctccgctgcgagtttgacccaagtcgggttcacacaaacggaagcgaatttatattcttttgcttcttttatcagttgtaaaatatccgctttttgtgtatgcggtttcaaagcagtatggtctatttgacttgcaattgacattgtatgcacttcctttttcctaggatacgtttagaataaccgaattttgaacatatgtaaattggtaattgaaattatgttcatgaattgtcacaattcttgaatgagttttttggccgtatgctgatcagtaatcaaaacgttggcgtactttcctttcagggcaccgtgaatggccttgcattttctgctgccgcccgccaccagaatcgaacgctctttcaatttcaggtcgctgagctcaactccgatcgtcctgccgttaatgctgctgctgcaaatcctgccttcctcgtcaaaaaagcgcgaacaaatatcgccgactccgcgtgctttcagcaattgtttctcttcttcccggaaatagccgagtctgaaaagcagcgcctcatcccggacggttccgaccgtaaacagggcgatattggcttgtctgcccatttcaatgatccgcttaatatgtctgtcccgctcgaccatctgtttcacatcggcgctgtcaaatataaccggcagcggcaaatacctcggcatggtctgaaatgcttcggcgaacagctgaatcgtttctgacgaatacgtattgacattggaatgactgatgccgcctttcagctgcacgacttcaacgctctttacctgcttcggctccatgcggcttgcgatctggtacatcgtcgtcccccagcttacgccgagtatatcgccgtcctttacggttttatgcatatagtctgcgccatagcggcttaagtaatgtgtaatggcctggtaatcgtcgcttggagaaaagacgacgtgcgcctcaagcagcccgtatttttcttccagcttcgcgccgagttcatccagatcctcaaacgggtccatgacgcgaatttgcacataccctttttcctttgcgtactgaagcagccttgaaacggtggggcgtgacagattaagccgttcggcgatctgctgctggctgtaatctgattgataatatagttttgccgcttctatgctgagctgctgtttttcacgatccatgtcgcgcctcccctctccgcttatcatatcaccaaaacacgcggtaaaaaagcaccctctgatggggtgcctattttttcagcacaagctcctgaatcgcgtgcgccacgccgtgttcgttatttgatttcgtttcataatcagcaatctcccttacttccgggatggcattggccattgccacaccgcagccggcccactgaatcatggacatgtcgttgccgttatcgccgattgccatgacgtctttctgttcaatgccgagtttttcggccagcagcttgaccgcgtttcctttactgactttcgggtgaagaatctcatggaagaatggcgcgcttttgaccattgtgtatgtttccctgaatgattccggaatagaagcgatcgctttctccagcttgtccggatcgtcaatgaacatgactttcggaatcagaatatccttcggcacttcatcgatcgtgcggaaatgaagcggcactttcgtaatgtatgattcgtataccgtgtattcactgatatcccggttcggcgtgtacagattggctgtgtcaaagtaatgcatcggagtatccaactgtaagctcagctcgtaaagcgactccaaatcttcaaagcctaatgactgctcggccacgacaccgtttgtatacgtattttggacgagtgcgccgttataggcaatcacaaagtctccttcttcctgtaagttcagctcttccaaataccgacgcacgccgccgatcggccggcccgtgcacaggacgatattgaccccttccgctttggcggcatcaagcgccccgcggacttcagccgtcacttcatgatgatcgtttaatagtgttccgtccatatctattgcgattaacttgtacatcctgcatctcctttgtatccttttctgcttatgctttcatcatatcgttttttcgtttcaatgaaaaatcaaacggacaagtttctccgccttctcttcctataccgggcctgcctccggatgcggggccgtcttttccccttgtcagcttgttcgccgctgtcatctgttttctgcttcaagagcatcagccccgccgcaaagaaagggacggccgctatgtccagaagggcaagctttattcccatcgctgcgggaaagtatgcccataatgaacggctgttccgcctgatcatgatataagaaacgatttccagcaggataaacagagcgttcacccacaagtaaatgagcatcgccgcaaacagaaacagcaggagcgtattccgcagcgtgccggaaaacagaagagcgcgcatcatatcaaagaatgaaaaagactgcatgctgccgttgacgacattgggattataaatggtaaaacgcccgaactgatcaaaaagcataaaaaataaccataacagtgaaaaccattgaatgatatgtacgatgacacccgtcaaaacgagtctgtcggcagccttatttctcatgtgcatcctccccgccggtttttattcttgtcattgtttttgtttctccgtatatcttccaaatgagcgtatcgttttttcctcttttcaacgtgcttttgacggggtgcggatgtccgaggtattcaatctcgatcgtcccgtccgtgttttgtgagaccaccttgtaagcatctgagggcatgggaacctcgccgcggcctttaatgacctgctttgtcagcacgctgtctttcgtaaacgtaacggtttcagatctgaccccgtccatcgggcccggtttcagccccgcatcccatgtcccgtaataaaaagggggttcgtctgctttcttttgcgagcagcctgttatcatgacgcatccgataacaagaaccgtcatgatgaaaatccgtatgttccgcaacatgatcaccttcctttgaagctctttttacgcctgtaagttaggcggatgccgtggcactgtgcaattgactacatagtgtataaagacttcactagataaggagaatgatgaatgaacccatatcagtactacaccccatctgcctatttccctcagcagcaggaatacgaagtgagccccgttgagtatgagccgtatcagcagcaggaaagctattattatgcgccccctcagtctgaagagcggcagccgacggctttagaacggagagtcgcccagcttgaaagacaaaacgcccagcaaacgagagagctcacccgcctctcacaagaagaccagcgccaaaaccgggaaatcacgcgtatgaatgagcagatcagacggctgagccagtccattgaaatccatacccgccgcttaaaccgtttgaatcagcgcctgcgcgcagtcgaaaacagactcaatattccttttcacgctacagaaggcggcttctgagaaaaagggccggaatacaaagctcgacaggccatcccgagccttgtattccgctctgtacataacaggtaaatatttgaatccttttcttgcatgaatgcctctcctattctttcacatgataaatgtgtaaaatcaatcacttcaggaggtcttcatgatgtatcaaaaccaatacagcggaaatcagctgcagcaatgccgtcaaacagcacagcagcttattcagcagacacagcaaagcagtcagcagtacaagcaaatgctccagcaggaacagcaaaacattcaaatgcttcagcagatgcttaaccatgaacagcatgccgttcataccattcagcaagcgctgcaggggcatgaactggccattcagaaatgccagcaaatcgtgaatgtgtgcaatcagcttcagcaggaagtaagcggacacatgcctgcaccgatggcaaacgctaatgtttcttcattcccgcaaacacagcatcacacacaccgtttcagcagcattcataccagcaataggccggtcatgcaaatgacaaagcgcgagataccggctttgtcatttgtttttatctctgttttgtcagatcaatgcgttgagcgggttttccgccgaatttttcctccgcctcatgccttaccgcttcaaacgctcttgcttcgacgttttgtttaaacacatcaagctgtattaaataagccgcccgcactttcagcccgtggatgatggagatgacccataaaggcagcacgatatacacgcccggcgtgctcggcagcacaaaagcaattgctaaaataataaaatagataagtccgtatttcagccattttttgttcttggcccggtagccgatatagaaaaaggccaagaaagcggtcagcccaaacggcgcgaaagtcagcagcagccaccagctgtgcagcacttcccaccaagtccctcttttcgtaatcaacattcattcctcctcctttactactataacatggataatcaaggaaggttttctataaaaaacatagacggaatgacgtcttcctgctatattaataatgataatcattatcaccgaaataggggatcattatgaagaaacaatcatggctgatcggcctggcacttctgcttgttttcgcattaagcgcttgcagcggcgcgaaggaaaacaacggatcggcatcaggcaaaggaaagacagacatgcgtacatatgaatcaacaaaaggaaatattgacatacccgcacatccaaaacggatcgtcactgacttttatgcgggtgagctgctgtccgttgacgcaaatgtcgtcggggcgggctcatgggctttcaaaaatccgtttatcaaaaaacagctgaaaaacaccacggacatcggcaatcccgtcaatgtggagaaagtgatgcagctgaagcctgatttaatcgtgctgatgaaggatgaccaatacgagaaactatcgaaaatcgcaccgacgattgtcattccttttaacaccgcaaagaatacgaaagatacggtcagcctattcggcgacattgccggggcgaaggataaagccaaaagctttatggcagacttcaacaaaaaggctgaagccgatcaaaagcgcctcaaaaacgtgatcggcaaagacgagacagtcggcctttatgaaacgacggataaaggcgaaatctggatttttaatgacaattccggccgcggcggccaagccgtttataacgcactcggattgaaagcgccggccaaaatcgaaaaagacatcatgaaaacgggcgccatgaaacaggtttcccaagaggtcatccctcaatatgcggctgattatatgttcattaccgattacaatccgaatggagaaagcaaaacatttgagcgtctgaaagagtcatccgtttggaaaaatctcgatgccgtaaagaacaaccgtgtctttatcaacgatttcaacaccttctatccgtatgacccgattgccgtcagcaaacagatggatatcatcaccgacatgctgatcaaacgggctgaagaaaataaaaaataaaaaataaaaaaagcggcacagtcatgacactgtgccgtttttcatgttcactttaattttgactgtacggagcccggcatatcttcaaatctgacttcttcccaggtctcgacatactttcctttcgccttcaccttcaaatacgcgttcttccgaaggtctttcccggcgaaaaaggtcacttcttcttttttcccggatgcgttatatccgtctaatgtatactcagtaccgcccgggctaagatgtttgccatctcgatcaatctgtacataaacatcttgctggtgaataaacggattaaatctgtctgtaacatcattatgaaaaaagagaagtccgtatatgacggcagcggctgctaagacggccaggattgccaatgcttttttcatctgtgcactccccttacttgttcatttttttcaaatagcttgtccgcaccgctaggaagaacagaagctgaaagatgaaaaaccctccgatggtcagactgagcggccccgctacatcggaatagccttccaccgctaatgttctcaaagcaaacagcgtatgcatgacggcaatgacgaaaggaaagaaaaagagaatcgccaattgtatcgtcacgctttgtgccatttcacgctcactcagaccgattttggccaatgagcggtagcgctcccggtcctcatctaaatcggtgaacagcctgaaatataagaaactcgctgccgcgacaaagaaaacgatcgcgataaacaggccgatgaataaactcaggctcggcagctgcaccgtatcatagtacgtcccggcttttgccataaaatcagaatgcacgtcgatatagttgccgtaaatctcatttttcaaggattggctgatcccaagactgtctttccaatgatcatagctgtagccgtataatgacgctttctcaccgagtgatttcagctgatcaaaggtttgatcgttcaccgcgatgatggcattcaatgaaatcagcggttttttgacttcttttaccgtcagtttttggtcagacggcttgcctttttggttcagcagcttcagctgatccggcgcgtcgtttttgaaattgcggtcatacgtgcccgggaaatagacagcctcattatgtttcaggccgttcagcttaacatggaagtatgttgatacatccgattcgctgatcatataaacagggggaacagtttctccttcctgatagcgaacataggaaacatctattttgtctttcttatacgtaaagccgtgtgttttcagttcatggtcaatatctttcaaatgagtctgttctttcgggttattgctgaaagataaatactccatctcataggcggactcttccgccccgacggtcgatttgtacatcgcgagcacgcccgtcgccgtaaaggcaaccgcggaaataatactgacgataaagaacaggcgggcgttgtcttttaaacgatagacaaggtcagaaacccaaataacatttttcccgcgcagataaaaggttttccacttcttcagcgcgcgcagaatccagatgctgctttggctgaaaaagaaatacgtgccgatgacggtaagcagtaaaatgatgaacggctcggtcccgtggacattgcctttcagaaccatgccgtacccgccgcacaggcaggcgatgccgaataaggacagaagcacggacggcttcggctccggcttgatcttgtcagtgccctttattaatttgatcaccgtatttgatctgacaaaaaggatcgtgaactgcgataaaaggaaaaataagagcagaaatccgccggccgtaatgccgagcgctttccaaggcatgtacagaggcagcgcgtccatttctaaaatataagcgccgaccgtaaagaacgttttcgaaaaaatgaagcctccgataatccccgctgcgatcgacatgacgccgatgatcatgttttccgccgtaatgagctttctcagctgcaccggcgtaataccctgcatcagcagaataccgaattctttatttctcgatttcaaaaatgcgttaaccgaatacagaacaaataagaaagaaaaaacaaagatcatccattccgcggcggttaagccttttttggcgatgttattcaggtagccttcctttagtgccggatgaaacaggaacatcgcaaaggtaaagaaaatcaaaacggaaaaggcgctgctcaagaagaatgcaagataggcccttttgtttctcgtgacgtttttataagcgaactgaagaaaggtcatttgcgtttccccccagcatagacagcacatcaagaatctgctcataaaagacttggcggttttccccgcggtaaatctcattaaacagttcgccgtcttttataaagatgacgcggcggcagtagcttgccgcaaccggatcgtgggtcaccatcaaagccgtgacatgatcatcctgattcaggctctgcatcgtttccatgacatcttttgacgctttggaatcaaggtttcccgtcggttcatcggccagaataagtgacggcttatgaatgaccgctcttgcgatggcggcccgctggcgctgtccgccggatacttcaaacgtccgtttattgagcaggtcctcgattccgagctttttcgcgatgccgtgcagtttttcttccatgacagacggcgcttctttttcaagcgttaacggcagcatgatattttcaccgattgtcagcgtgtccagaagattgaaatcctgaaacacaaatccgagctgcttgcggcggaaatgagcgagctttgtccgcttcagccggtgcgggttttctccgtgaatcaggatatcgcctgaatccggccggtcgatcgttgaaatgatattcaaaagtgttgtttttccggagccggacggtcccatcaccgccgtgaacccgccttcttctattgaaaatgaaatttgttttaaagcttgataggatacttgtcctttataggttttatttatatgtttgacttcaagcatattcgccatgagaatcctccttatggttttattcttgttgatctgggctgctttcatgtagtgccggggcattcagcataaaaaatccccttgacgtaaatccatgttatcaaggggaaacagaatgagctatgttgttttcttaacgcagtcttacatttttgtaagaaatgaaaatcggaccgatgtcccttcaccggggacgagctgatgtccaccgtatgattgagcttgcccgtaatttctttgacgagatggaggccgattcccgtagattcttggaaacgccgcccgttttcgccggtgtaataagggtcaaacacccgcttgatatcttgcgagggaatgccgacaccgtaatctttgacttcaagcatcgtcctgtcttcatcgcggaagacattcagctccagtctgtcactcttgcctgccgaatatttgaccgcatttgtgacgacttggccgatcgcaaatttgagccatttggcatcggtgtaaatctgatgatcatcgcgaatatccattttcggatagacgcggtattgaataaaaaatcgtttatagctttgaatgaccgattggagaagctctgataaggaaaccgcttcgactttaaaatcccgctcaaacaggtcaagccttgatgaataaaggagcgtctccagcccgaattcaatctgccggacctcttttttgatttgttcaaagacgggctcatcctcttcctgaatgattaaattaatgaccgacagcggcgtttttacttggtgcacccattgattcatatacgtcacccgcgcgtcgagcttggcttcggtctcgtagagcttctggtgctgcagccgggtcagctccatctgcttttcatacagctctgaacagaacactgaagaaccgagatacgggatgtccgtcccttcctgctccgagctgagccaatgatacacaccgcggtctttgtaccagcgataggcaagataccccgccaaaataagaagctgcacgcccaatatgtaaaacaggtgggaaaaagaatgaagacccgcaaaccagtaataaaagaagacaaacagcccttgaaggagaaaaagcagaatcagcacggcatgagaccggagaaacagcttcatgacagcgccctcagctggtagccttcgccccgcaccgattcaatggaaacaggcgcgttcagctcccgcagtttttttctgagccgcgtgatatacacgttaagcgtattatcatcgacgaaaatgtcggtgtcccacgttttttccatgagccggtctcttcccgtcaccttttctccccgctccagcagcacttccaaaagcttgctttcttttttagaaagctcgcttttttcgtcctgaaagcgcagttcaaaccgttccacaaagagctgcacaccggcatattcaaccactttctctccctgcttggcggcgtactctccgtatgccctgcggatctggcttttgattttcgccagcacaatatcataagaaaacggtttttcgatataatcatctccgccgttttcaatcgccatcacctgatccatttccccgcttctggctgagatgaaaatgatcgggcttgtagaatgctggcggatctggcggcaccaataatagccgtcataagacggcaggttgatatcaagcagcaccacatcaggcttttcccgcaaaaagacatcaagaacagccgtgaaatccgcggcggccacggtttgatatccgtatttttcaaggtaattctgcaatagtccgcgaatgtcttcactatcttccacaatcatgattttattcaaactgaaccactcccgtttcttacactgctgccatcatcataatcgtttcgggcgtacggacgcaacaccgcacaaaaaaaccgccatcttggcggtttccgttttcatcagccgatctgctgttttacggctttaccggctgatccgaactctctcattttgcttcgcaccgtctcttccacggcttcaaggccgggtgtcatgtagccgcgcggttcgtacagatcgccgttttcctgaaacatgcggcgtgtttcgtctgtccaggctaccatacattccgtgttgatattgattttcgcgtggccgagcgtgatggcttttttgatctgatcctgaggaatcccggatgctccgtggagaacgaggggaatatcagtcatgcgggagatagccgccatttctttaaatccgagattcggctcgccctgatatttgccgtggacggagccgagggcggccgccagcgcgtcgatattggtttctttcacgatccgttcacattccatgatatcggcataacagaccccgccgacaagtccgtcttccatgccgccgaccgtgccgacttcggcttctactgagacgccgtgctttgcggcataatcggtgacttcttttgtcatcgcgatattctcgtcaatcggctgatgggagccgtcaatcatcactgagctgaatccggcgtcaatggcctgtctgcagcgttccgcactgcttccgtgatcaagatggagcacgacgggaacggtaatcgccatttcttccattaacgcgccgaccatggcggaaatcgttttaaatccgcctaaatagccgaccagacgatcggaagccgcggcgatgaccggcgattgctccttttgcgccgcttgcagaatcgccttcgtccattggaggccgttgatattaaattggccgactgcataatgctcccgtttcgcttctgcaagaagatgtttcatggtgacaaaagccatgttcacgcctccttcatgaagtattttgatacgacggcttccgttgtttcctttgccgttttgatcgtttcctccgcagtcagcttataatattcaggtctgaacagctctacggagacaacatcattgaatccgatttcttttaacgctgacagatgggcgtctaagtcaatcgcaccctgcccaggccagacgcggtcttcatccgttaaaaagccgatcggaaagtcttctgtatcgtcgatatgatagatgaaaattttctttccgtccgcctgcttcaagctctcaatattggagcccatcgcgtggaaatggaagctgtcaaacaccagtccgacattatcgcggccgacagcgttcacgatgtcatacgcctgttcaaatgtattgaccgtgcattgcgggtggccgacaaattcaagggcaatgtttacgccgtacggctccgcgatgtccgaaagctcagtcagcacctctatgctgctctttttgatttcttctttcaagattttccgctctgtcacaagcggcacggccaccacatatttcacgccgagcgtcctgcaggtttccatcatttttttgaattccgaaatgatctccctataacccttctcatcacgattgttgaagaaaaccagggcgttcagggcaagcggtttaatatgatgggtatgaaaatattccgccagatcggccagtgaatggtcttttaagtattccggcagcttatccattgtgcggatttcaatataatcatagccgtgcttttcgcacagttctaaatcctgtttcaggtttgaattctccagcgtagtcgcttcattaaagcaaagtttcatgtcagcctctcccatccgcgttttcgatatgaagggagtccggctgaagggcttttttgccccgctccgccgaactccatactcagcttatgccatacccagttcttcctttaatttcttaagcgtggtccggcttgattcatccgctctttcgccgacccaagcaaacacggcgttcgtcgcaattccgtcgaatttcatctctctcatctttctgaaaatcgtctcaaaatcgacctcgccttgcccgatgtccagatgctggtgaaccgttactttcgcatcaggcggattgacgatgtaacgcaggccgtgcgccgctttatgattaaaagtatctgcaaataaaacatgtgtgaggcggtcgccggcttcatcaaacatggtttcgatatcgcctttgccgtcatcatagaagaacgtatgcgcagtcgagtagacaagattgatccaatccttatcgagcgcgcggatcatatccatcgcacctttgtgcgtttcgataaaatcgtatggatgggcttgaagattgagtttaacgccttctttttcaaagacgggcagcagctcatccatggatttgatgaatttttcttcacttgtcaacggatcatactttgaaccgctgaattcactgttcatcaaatccacttcaagttcaaccgcaatttcgatcgcccgtttccagttgcgcacggcggcctggcggcggtcttcatcaggacccgcccagtggtaaagcggaagaagggaggacagcttcacacctgtatcctttaaaaggcgcttcaattgtttgatttttgctgaatcgactttcggatatttatagaaaggacaaaaatcctcgcgcggggacagttcgatatattcgtatccgagttccgccgttttatagaccatttcctctaatgttaaatcatcgcggtacatggatggatctaaggccagtttcattttttcactcccgatctattatttgttcacagtcgtaaatgattgatagaatgccggtttctcttgaagcgccactggctctttctgtccggattcctgagcttttacgcacgcgtctgttgtcaccgcggcaatataaccgtcccatgccgtcggaccgctgacttcgcctttcttccggatcgaatcaatgaagtcctgaatttccacatcatacgcagccgcaaatcggcgctgccagtccatcagaatatcggtgctgaattttccttcttttctcaagctgatgcttgacggttccggaagcttaatgacgccgtcttccccgacgatttcacattgaatgtcatagccgtatttacagttcacatagatttctgcattgatgacgatgccgccttttgtttcgatgatgaccatctgcggatctttcagatgcggcagcgcattttttgatttcttcggatagatgacttgtacggattcatagtcgtcattgacaagccagtggaggacatcaatttcatgaacgagcgtatcgacgacggccatgtccgttgaataattcgatgcgactgtcgggttgcggtgcgcacagtgaatcatcagcggctcgccgaccgcacggttgtcgatcgcttctttcagctgaacgtaaccgctgtcatatctgcgcatgaaacctacctgcaccaatcgttttcccgtcttcatttcttcctcgacaatgcgcatacagccttctgccgttgtcgcaagcggcttttcacaaaacacgtgcttgccgtgctgaatcgctttcaacacgctggattcgtgagccgggccccagcttgtcactaagacggcatccacattttcagcagcgagaaggctgtcgtcatcaggataaaccgaggcgttcaaattgaaatgctgaacggtctgctgcgcggcctcctgattcacatctgtgacagcggtaatttccgcgcccgacagcttatttgtgatgcggttgatgtgctcttttccgatagcaccggttccgataacacctatacgtaaattcattgatcgccactccttctgataatcaaataatggttctcgtctttcttttctctctgccgtcctgaggagcaccgtacagttcctcctgtatctgttcaagcgacttgccggacgtattcggtgcgaagacaagcccgatgatcatactggccgtcacacatatgagcagaataccggccataaaaccgatgccgaattgtgacatgatgaccggcacaaataaactccaaatgccgattgaaatacggacgagaaagaacatgagcccttgtgctgacgctctgtgttctgtcgggaacagctcgcttgcccacagctggtagttcgcctgctggccggctccgttattgatgccgatcgctaaaacaaacaaaagcagcatcgggagtccctgaaacggcagcaaaaacagcgaccagccgacaacagccataaaggcgcagattccgaacaccgttttccgatattgatctgcaaaaggcatgaagatacaggcgacgccgagcccggtgaagataaacagggccatctgcagaatgttggccgtatttgcggatacgccgccgacctgctggtagatgtacggcatgaagaatcccatgacgcccgcggcgagattccatacgagaaacacacccattaaaaacaaaatgttcttgaaaaatttcggctgaagcaagtcaaaataagatgtttttttcacggcggcaggccgctcttcactgtttttccaggcatccgactcaggtaaacgctttcttatcacatatgtgatcagggcgatcaccaatagatgcgcaaagacaattttatttcctaaaagcccgaggtcaccgaccaaaacggataacagcagaaccacaacggctccggcggcccacgccacctgcgccactccgcaatgcctcgcccggtttttctcgggggcgttttccgcgataatggtccatgaagccgtaatatccgcgcctacagaaatcccgataatcatgtatccgcataacagcatgggaaagttgaatccaaacaaaaccaaacaaattcctaaagcgtagacgagcatactgtttgtgtatacagcttttcggccgaccttatcagccaaatacccgccgagcagcgctccgatggccgctgatatcgcgtttgcgctgaaggcgccgagcaatccgatctgactgtcggacagcttcaagtagctgacccacatagataaacccgctgatcctgccacgatggaacctgcatcaatgtaatttgctaatgctgcggcgatggtccgtttgctgaaagctgattccgccttggcactattcatataagtcccctctaatttgcaggatcaagcagttcactgtcgatgtactttctcgcaatcagcgcgtactcaagcggattggcgactgccgggtcttgttcggcttcaatgacgatccagcctgaataatcatgacggacgagcgtttggtacacttcggtaaaatcgatgcatccgtctccgggcaccgtaaaaatgccctgtaaaaacgactgcctgaatgacttgccttcctgtctgcaccgctccataatgtcaaaccgcgcgtccttgaaatgaacgtgtctgatccgatccatatgcttgttgagaatcgtcatatagtctccgtctgagatataggcatggccggtatcataaagtaaatggacataccgcgggtccgttccatccatcagccggtcaacttcttccgccgtctggacgcctgtgccgagatgatgatgaaacgtgagctccagcccgtattcgtcagcgattttcccgagacggttcaagccttggcacagtgtatcccattcttcatttgagaagtgcggttttttcttaaatacatcaatatccaagccctggacactgtacgtctgttcagaaacgatggcggcatccgctccgactttctgcaaataatcacagtgttctgtaaattgttcagccgttttttcaataccgtcttgaatgataaagctgctgaaccatttccccgcaatccgcaagttccggagagccagctccttattgaggacggagggttcagggaaaaaccctcccacttccgtaccttgaaaaccggcgacaacaatatcgcttaacaaatgctgcagcgtattcccggctccgatctccggcatatcgtcattgcgccacccaatgggagcgatgccccacaaaatattttgtttgcccatcgtgatgcctcccctctagtactgcttcgcagacttcagcttcatctctttcgcttcgtatgcccgctgaacgctttcctgctcagacacttccgccacgccgacatgccaccagctgtcatagccgtccgtcatcgttttcggcagaaccttcatttcaattaaagtggatacctcttgcgttttcgcatcttcaagcgccgctttcagttcttcaaccgtattggctctgtatgttttagcgccgtagccctctgccaccttcgcgtaatcaacgtttaaaatctgattgtcctctgtgcggaactcgcagaaataactgccgctcccgtgatccatctgcaggttgttgatacagccgaacccggagttgtcaaagagcaggacattgatttttttgttatattgaagcgcggtaatcagctctgagtgcagcatcagaaagcttccgtcgccgacgagtgaatagacttctttgtcgggatgagccagcttgaggccgagcgtgcccgatacttcatatcccatgcaggaatagccgtactccagatggtacgtattcgggacgttggaatgccacagccgctgcagatcgcccggaagagatcccgccgaactgatgacgacgctgtcttcaggaatcgtgtcgttgatggtcaacagcgccgttgtttgcggcagctcagtctcgagcgcgtcggcatactcgtttaacacgtcctgtgagaaatggtttttaatttccggcttgaacgcgtcacgtgtaaaagtgaccttgccgagccggtcccgttcagccagccattcatctttccagcctttaatcgccgtgccgaatgcacttttatatccgtctaataagccgtgcagcctgccgagcgtcactttcgcatcggctacgacctgaaacgcgtcaagtttgtatgcctgcatgcggctgacattgatattcaaaaattttgctttgtcaaaatcaaacgccgttttcgaggatgtcgcaaagtccgtgtaccgtgtgccgacaccgatgatcagatcagcctggcgggcggctttgtttgcggcaagtgtgcccgtgatgcccatgccgcccagattgttggcaaaatcggcttcaaccgttgacttgccggcctgcgtttcgacaagcggaatgccgtatgtttcagaaagcgcgattaattcctcacgcgcgccggagtacttcgcgccgccgcccactaaaatgacgggacggctgctctccttaattctctccgcggcgcctttcagctcacgctcgctcggctgcatccgatcaatgtaatgaacacgtttttcaaagaagctttcatcaaaatcaaatgcttctccctctacatcctgagaaatgcagatggtcgccgggcccgcttttgccggatctgtcatcacttcaaatgcccggattaagctgctcatcagctgctcggggcgggtgatgcggtcccaatagcgggacacgggctttaacgcatcgtttgtcgtgacggcggcgctgtattcctgctccacctgctgaagcaccgggtcaggctgcctcgtcgcaaaggtatcggccggaagcagcagcaccgggatatgattggccagcgccgtacccgcggcagccgtcaagttagcggcacccggaccgaccgatgtcgataccgcgtaaatttttcttctcagcatctgcttgctgtatgccatcgcggcatgcgccatgccttgttcgtttttgccttgatagactttcaggtgcccggcgtcctgctcgagcgcctgcccgatccccaacacatttccatggccgaaaatcgtgaagatgccctcaacgaacggctcttcttttccgtcaacatgaatgtactgccggttcaagaattgaatcagcgcttgtgctgtcgttaagcgaattgtcttacccacaaacgatcccaccttttatacgttctatttaccgttaagactgtgctgcgcttcaatcagttcgatgatttcaccggcagccggcattgcttctgaggagctgtgtttgctgacgacgatggaagcggaagcgctcccgtattttaacgacgtttcaatatcccggccgctgaccagtccgtagatgaaagctgacgcataggaatcacccgctccgaaggtcttcagcacctttgttttataggcgtgcgcccggaaaacttctcccgatctgctgtatgcgtatgatccgtcaacgccgtgcttaatgacgacaaggtcggcggagtgcgcaaacaaatggcggacggtttcatcgttatttccgccgctgcggttttccattacgtcaaattcgtcacgcgtaccgatgacgatatcggattgttccgccgccagcgtgtagtacacggctgtttcttctgccgattgccatgtatacggacggtagtcgagctcaaacacgacttttacgtcatgtttttttgcgatttgcaccgcttttaagacggcttcgcgcgacgggcttttcgcaagcgccgtacctgatacgagcagcattttcgcgtttgcgatgtagccttcattgacttcggacggctctagatacaaatccgccacgtcatcccggtacatcagaatgctgcactcttcaggactgagaatttccgtaaaagcgagcccggctttgcgtccttctctgtcaacggtcatttgtgacgtatcgacgcccttttcctgcatataagaaacgataaatctgccgtgctggtcatccgggattttgccgataaaaccggcttttaatccgagcttagcgctgccgatcgcaatatttgccggggagccgccgacatatttagaaaacgtcatcgtttcttccatcggccggttgtattccgccgcgttcaaatcaatacacgcgcgtccgatcgcgacaatatcaaactctttttcttcattaaacgtatatttcatcgttatctgccactcctcacttgtcagcgttccagaatccattcatgggccggatcattatgaaacttccattttcgtgtcggtcccgccattacattcatgtagtaagaggtatacccgtccggaacaccaaccgggtgatagcccgccggcacgatgacaacgttttcattttctgcggtcatcgtctcgtcaatcgagcggtcgtccgtgtacacacgctggaagacaaatccctgcggcgggtccgtttcatggtaataggtttcttctaaaaatgattcagccggcagattgtcttggtcatgtttatgaggcgggtagctcgaccagttgccgctgtccgtgtaaacttcaacaacgagaaggctgtttgccgatggatctgaatcggggagaatgttatgaacggttcgtttgtttgccagcttgccgcgatgttccacaccgttgtcttccgctttaatcagctttgtcggaagctggtgttcggacggagagtagcacagcgcgaccctcgccccgctgacggctgtgattccaaaagagcggtcattggacacataaacgctgtccgtcggttttctatcaaatacgctttcacgggtgccgatgctttcaaatgtctgatcataatcagtgacggtaacttttccagttaccgcaacgatgcagcactccgtctttttcaaatcttctgtataggttgagccgggagcgagatcaacgactttaaatccgacgtatttgaggtctgaattggctgaagtgacgtcatgtatgatggtcacgccttgagaaatttcatcggcctgcggtttgcgcagcaaatgactcatgtttattcctccttaatggatggtaaaagaaaacccggacggaatcacaaagccgtccgggccggctgtctgatcaattgaagtcaggagacgggtatcgtgccgtcacgacttttttacgtgtatagaagtcgacgctgtcttttccgtttgcgtgcaatgtgccgaagaaagaagacttccagcccgagaacgggaagaatgccatcggcgccgggacgccaaggttgatcccgagcattcccgcgtcaatattctcacggaagtagcggatcgcgttcgcatttgacgtgaacaggcaggcgccgttcgcaaattcagactggttggcgatgtcaaccgcttcttttaaatttttcacacgcatgaccgacagaacaggcgcaaagatctcatctttccagatcgtcatatccgtcgtcacgttgtcaaaaatcgtcggtccgacgaaatagccgtcttccgttacatgttcacggccgtcacaaagcagtttcgctccttcttcgatgcctttttcaatatagctgtgcgtgcggtttttgttgtcctcgcggatgaccgggcccaagaacacgccgtcatccagtccgtttccgatcttgatgtctgcggccttttcctgtaatttcgccataaactcatcggcgattccctcttcaaccgtcacaaccgcgcatgccatgcagcgctctcctgccgaaccgaatgccgcgccgataatgtttgtgaccgtatcttcaaggtgggcgtcatttaacacgatcgtatggtttttcgcgcccgttaacgcctgcacgcgtttcaaatgttcgctgccttttttgaaaacatactcgccgacaggttttgaaccgacgaatgagatggctttaatctccggatgctcaagaatgccgtttacgacgtcatgcgcgccgtgcacgacattgaagacgcccttcggcagaccggcctgttcaaacagctctgccagtttttccgttaacagcggcgtgcgctcagaaggcttcagaatgaaagtgtttcctaacgaaatcgccatcggaaacatccagcacgggaccatcatcgggaagttgaacggtgcgatgccgccgaccaccccgatcggatagcggtaattcgccgcctctacatctgtggcgatagaggcaagtgaatcgcccatcatgagtgacggcgcgcctgctgcgaattcgacgttttcaattccgcgtcccacttcaccgagtgcttctgtcgtgtttttaccgttttccaaagtgatcagacgggcaagctcttctttgttctgctggagaagctgctgatagttaaatagaattctcgcacggcgcggcactgccgtcttcgaccatgttttaaacgcttctgacgctgagcggacggcgtattccacatcctcccgcgtagaaatcggaacctggcacatcacttcttttgtagccggattgacaacgtcttcatattgatctgtcttactttcaacccattcaccattgatgtagtttttcagttttctgatctctgccattctcattgcctccttaaatagtaaacatcctgttcagctggataataacggatgaatatattcatcttttacatataaaagacatgaattaaacgcttacaaatgctaaaatgatggtgactcccaatcttttcatgtaaaagttggtcatgtgccggataaagcaaacggttacatctttcacttttgattttacaggttatattttggtcatttcttggttacattgtaagcccaacacaccttcaagtcaatctaaaaaatcaaaattttttcattatttttatcatactttttttaagcgggaaaacaggaacttggagaaccgtgtcgaatcgtacggtgggaaccctcttttttatcatttgttaagtaactattgattaactcttggtgtttattatatattttaattactttaagaattctagaaggagtttttttatgaaactgatgcggattcaggagatggaagaatacattctcaaacacggagccacttcgctggatgagctgtgcgaggtattcaacgtctctaaaaacacggtcagacgcgatattaataagcttgcggaaaaaggggtgatcaaaaaggtgtacggcggcgtgacgtcagcagaaaaatctgtgctcgtcccttttgagaaccgcaccattcaacatcaggatgaaaaaatcaaaatcgcccgctatgcgtcgcggtttatcgaggatcacgatcttgtatttattgattccggcacgacgaccaaatcgatgctggagacgcttgacccggataagaatgtaacggtgttgacgaacagccttgatattattaacgccgcttcatccatgaaaaatatcgacctgatcatcatcggcaataactacaaacggaagacaaggtcgtttgtcggcattgatgatccgggcacactcaataaatacaacattaacaaggcgttcatgtccgctaccgggacaacgatcacccacggcctgacgaattccgacttactggaatacgaggtgaaaaagaaaatttccgaaaaggcgaacgaagtgtatctgctcgcggatcattccaaattcggcaaatccacgcttttgacatacgcgccttttgaccggcttcacagcatcgtcacttctcagcagctcgatgaggaatatacgaagtattgccaagagcaccaaatcgacattcacttggcatagcgttatagttaatagagaacgctgccgtattttcccggcaggcgctatgatatccaattttttcagggggcgaaaacatgagcaaagtaacaatcggcaaaactgacctaaaggtatttccgatcggtttgggaacaaatgcggtcggcggacacaatctctatccgaatctgaatgaagaaacgggaaaagaattggtccgggaagcgattaaaagcggcgttaccatgttagataccgcctatatttacggtgtgggccgttctgaagaattgatcggcgaggtgctgaaagaatataaccgcgaggatgtcttcatcgccacaaaagccgctcatagaaaagaaggcaatgactttgttttcgacaactcaccggcctttttgaaacaatcggttgaagacagcctgaaacggctgcagacggattacatcgatttattctacatccatttcccggatgagcatacaccgaaggacgaagccgttcaagcattgaatgagctgaaaaaagaaggaaaaatccgttccatcggcgtatccaatttctctttggagcagctgaaagaagctaataaagacggcttagtcgacgtgattcaaggagaatacaacctgctgaaccgtgaggcggaaaagactttcttcccttatacgacagaacacggcatctcattcattccgtacttcccgctcgtatccggactgctggccggcaaatacgacgagaacacaaccttcccggaaggcgacctgcgcaatgatcaggcgcatttccaaggggagcagtttaaagaaaacatcaaaaaagtcaaccagctcaaaccgattgctgaaaagcacaatgccgatacggcgcatatcgtgcttgcctggtacttggcgagacctgaaatcgatatcctgattccgggcgccaaacgcgcggatcaattaaaagacaacatgaaagcagcctccattacgctatctgctgaagaaatcgcgtttattgacaagctgttttcctaagaaaaataacacgcctttttgaaagggcgtgtttttttatgtttatatttttctcttcggggaatgaaatagttatctaaataaactattatgcgttccaaaagatgaggaggatcatctgtgaagaaaaacaccaaaaaatacctgatttactttttcggagcattgggcgggctgctttacggctatgacaccggtgtgatttcaggggctttgttatttattaacaatgatattcctttaaacacgctgaccgagggattggtcgtcagcatgctgctgctcggtgcgattttcgggtccgccttaagcgggacatgctctgaccgatggggccggagaaaagtggttttcgtcctttcactcatttttattatcggcgcgcttgcctgtgcggcttcgcaaaccgtcaccatgctgattatctcccgtgtcatactcgggttagccgtcggaggctcaacggcgctggttcccgtttatctatctgagatggcgccgacaaaaatacgcggaacgctcggcacattgaataacttaatgattgtaaccggaattttactcgcatatattgtgaattacatattcaccccgtttgaagcttggcgctggatggtcggtctcgcggcagtaccggcggcgcttttattaatcggaatcgcgtttatgccggaatctccgagatggctcgtcaaacgcggccgtgagcaggaagccagacaagtcatggaaatgactcacgacaaagaggatatcgccgttgaattggcggaaatgaaacaaggagaagccgagaaaaaagaatctacgctcggcttgctgaaagcaaaatggatccgtcctatgctgctgatcgggatcggcctcgccatcttccagcaggcggtcggtatcaacacggtgatttactatgcgccgaccatctttacaaaggccggactcggcacttcggcgtccgttctcggcacgatgggcatcggtgtcttaaacgtcatcatgtgtatcaccgccatgatcttaattgaccggatcggccggaaaaaactgctgatgtggggaagtgtcggcattaccttgagcctggcgtcactatcagccattctccttctggccggcctgtcagcttcaacagcttggctgaccgtgctgtttctcggaatctatatcgtcttttatcaggcgacatggggtcccgtcgtatgggttctgatgccggagctgttcccgtcaaacgcacgcggagccgcaaccggatttacgacattgattctgtcggcaaccaacctgatcgtttcgctggtatttccgcttatgctgagcgcaatgggcatcggctgggtgttcggaatattctcagtcatctgccttacatccttcttctttgccgcttacatcgttcctgaaacgaagggcaaaagtttagaagaaatcgaaacgcacttgaaaaaacggttctccttaaagaagcgcagcaaacaaaatcaaattcttaaacagcgcacactgtaatcaaaaaaggaatcgccccgctgggcgattcctttttggcgtcataccatgactttgcagatatcattcgtaaactcgaccggatcatggatcggcagcccttcaatcagaagcgcctgattgtacagcaggtttgtgtataaagcaagcttttcccgatcttgtccgtgcgcgttctttaacgtctcaaacacttcgtgattcgggttgatttccagcactttttccgctttgacctgctggctgtcaggcatggcgtttaacactttctccatttcgatcgtcacttcgccgtctgtcgcaaagcagaccggatgagattttaagcgttttgaggctctgacattcttgactttatccgcaagaatctctttcatgctttcgaacaggtctttatattcgttttcttcggcttcagtctgcttatcatcttcgtcactgtcgatgcctaagtcggcgcttgagacggatttgaactctttttcctcgtagcttgtcagcattttgatcgcgaattcatcaatatcttccgtgaaatataaaatttcgtagcctttgtccgccaccatttcagtttgcggcagcttttcaatccgctcatatgaatcgccggacgcgtaatagatatatttttgatcctcaggcattctggacacatattcgtccagagtgacgagctttttctccttagatgaatagaagagaagcagatcttttaagacgtctttattcgcgccgaaatcattatagacgccgaatttcagctgtctgccgaaagattcatagaaagattcgtatttttcccttttgttcttcagcaagctcttcagctcggctttgatttttttattgatgtttttcgcaatcagcttcagctggcggtcgtgctgcagcatctctctggaaatgttcagcgacagatcctcagaatccaccatgccttttacaaagctgaaatgatccggaagcaggtcggcgcatttgttcatgatcagcacgccgttggaatacagctccaatcctttttcgaattccttcgtataatagtcaaacggcatgttttccggaataaacaaaatcgaattgtagcgcaccgctccatcgacgctgatatgcacgtgggtcagcggtttatcaaaaccgtaatgcttctcggcgtaaaaagcctcgtaatcctcatccgtcagctcgcttttgttttttctccagatcggaaccatgctgttgaccgtctgttcttcctgaacttcttcaaattcgttctcgctgccctctttcggcttgttgaccgtctcttccattttgatcgggtagcggataaaatcagagtactttttcacgatcgctttgatgcggtagttttctaaaaactcatcatagctttcatcttctgtgttttcttttattttcagggtgatttccgtaccgacggtttccttgtcacacggcgcgatcgtgtagccggcggccccttccgactcccatacatacgcctcgtcactgccgagcgccttacttttcaccgtgactttatcagccaccataaacgccgcataaaacccgacgccgaactggccgataatgtcatggccgtctttcgagtcattttcttgcttgaaagcgagtgaaccgcttttcgcaatcgtgccgagattctgttcaagctcgtcttttgtcatcccgataccggtatctgtgacggtaagcgttctcgcttctttgtccgccgtcacttttatatagtaattgtcttgatcaaacgttaatgaatcatcggttaacgccttgtaatagattttgtcaatcgcatcgctcgcgttggaaattaactcgcggagaaaaatttccttctgcgtgtaaatggagttaatcatcatgtccagcaatcgcttggattctgctttaaacttttttttccgcacttcagatctctcctttaattatgctttgatgttatgtaaaatcttttcagcatctatttatcatatacagtgacaattgtcaactaggattagcagatgcatatattgtaaatttaacatgttaatggattcatttcacccattttatcaataaaaaagagagaatgttgatcatcctctcctctctgcttctttccggcggccgaattccttcttcatccatatgtatgacgggtagaaaaacaaactaaataagataagagatcccaagtttcgcaaagactcatgcagaacatttcttacagtgagaggaaacgtgatgtcctgaaacagaatagagataacggtgtagatcacaaatcccataggaacaatggcataacaataaaacgctatctccttcttatgctgtatcttcaaaatatgtaaacctcccaatgatgtatatacataatattaacatatttaataggtaattagaaacaaacctccgtatgtttatccccctattcagcgggaacaggtatagaaaaaggaggaatcgcaatatgggaagattaacagacaaaaccgcaatcatcacaggggccgcgacaggcatcggacaagcgacggcacgggttttcgccgatgaaggcgcccgcgtgatctgcggtgacatcaatgaaagcgaactgaatgaaaccgtcagcgccatcagaaaaaacggcggagaagcagaagcctttcaccttgatgtatcagatgaagaaaacgtaaagtcttttgcagacggcattcagcaaaagtacggaacaattgatattctgtttaacaatgccggtgttgaccaagagggcggcaatgtccatgaatacccggtcgacctgtttgaccggatcatcgccgtcgatctgcgcggcacatttctgtgcagcaaatacctgattccgctcatgctcgaaaaaggaggctccatcatcaacacctcctccatgtccggccgggccgcagaccttgaccgttccggctataacgccgcaaaaggcggaatcacgaacctgacgagagcgatggccattgattacgccagaagcggaatccgcgtcaattccttatcgccgggtacaattgaaacgccgctcattgataaattggcaggcacgaaagaagacgaaatgggcgaggcgttccgtgaagccaacaaatggatcacgccgctcggccggctcggaaaaccggaagaaatggcggctgtcgcgctcttcctcgcttcagacgacagctcttacgtcacgggagaagacatcaccgcagacggcggcatcatggcatacacttggccggggaaaatgctgattgataagaagtggaaggaagagacggagtgacgatagataataaaaaaagccagtgtaaaaaaaacactggctgaacaagctgagggcgggttacttaaaccagcccttttcctttgatcgggtaatggcttcaattcgatttttcacttctagtttatccagaatcatcgaaacgtaattgcggactgtgccgcttttgatgctgagggcgtttgcgatttctttcgtgttttttccgtctgcgacaagctcgagcacctctttttcccgttcggtcagcgggttttcttcactataaatgtcctccattaattcaggtgcatagacgcgtctccctttcatgacgctgcggatggcgctgacgagctcatcgctcgggctgtccttgagcatgtacccgctgacgcctgcttttagcgcccgctgaaaatagccggagcgggcaaaggtcgtcaaaatgatgattttcacaccgctgtccttgagttcttctgccgcttcaagacctgatttcccgggcatttcgatatccatcagacagatgtcgggcgcatgtttttccacgaaatcgatggcatcctggccgcttgtgcctttgccgacaaccgtcatatcctcttctaaattcaacagcgaaccgagtgcgccgagcagcatttgctgatcctcggcaatgaagatgttgatcatctgctaccatccttttcttttgattttgaatcattcgggattctcatggtcagctttgttccggcggctgtatcgatggctaaactgccgtttgcgaattcaagacgttccctcattccaagcaggccgtgcccctttgaaaaaaagcggtcttctctgcattgaaagcttccgtcatcttctaccgtaatgacaacctctttccaaagctgctgaatggtgatgcggcatactttggcgccgctgtgtttcacgacattggtgacggcttctttaatgcacatgctgacgatgttttcgttcagcaaagagatatgtttgggcgcttctttttcttcatacacaaattcaattcctgccgcttcaagaatttgccgaacattgccgagctcatccttcaatcggatgcctttcatcgatgagacgatttgtctgacctcatttaaggaagtgcgggccgtctgctgcacgcttttcagctcagcgcgggcctgttcagggtccttatatatcagctttcgggcaaggtcgcttttcagtccgattaaggagagcttttgtccaagtgtatcgtgaaggtcccgggcgatgcgctgcctttcttccagcttcacaagatcggcaattcgctcatttgcatattctaatttctcctcaaggcgctcccgtgcctttctgcttcgaatgctgagcggaagcaggatggcactgatcagtgtaatgacgataaacggaatttgtgtcaaaaaccattcttttttcagaacaaggctgaagttgacggcaaccgccgcactgatgatatgaatgtaatataagatgtaaaatggaactttgtctcggatatggccgatgaagtaggcaataaagaaggcgaaataaatataactgaacagcatggctgagccggtcgaaatgccgatcagaagaagcgcccataagtaaagcggccagccttttgcaacaaatgcaaagcggtatgcgccaaagaaaacgagcgtgaaaatgatgccggccacgatgacgaaggtagaagagcttttaaaaataaaataaaaaggcaggatgaaaaaaatcgtccatatataaggagaaatcccgttcagtttttgaaatttaaaatacttcttcatctttgttccaccttctgctgcttgtgtctaccatcactttatcaaaacaccgccttcattgcaccctcacgcatgaagagaaggctctttctgataagagaaagagccgtgcgccgtatcaggcatttttctttaaaggttctttcggcaccggatggggcgccgatgttttccgcgcctcccggaaggtgacaaactgcttttcgtcctcatcccacagacggaatttcatggattcaagacttgttttaagcgtaatggtcggtacgttttttaaaggctcgtgtccctcatgagcggcttccagcttgtagttcggcaccttcggacttaagtggtggacatgatgatagccgatattgcccgtcagccattgcaaaagcttcggcagcttgtaaaaggagcttccttctaccgcggcctgcacataatcccaatgctcatcggcttcaaaataagaatcctcaaacgtgtgctgaacataaaagagccagacgccgattgaccccgaaataaggaaaatcggaccctgaacaagcaaaaagttttcccagccgagaagcaagcacgtcgcagcagccaataagacaatcgccgcgttcgtgaaataggtgttccagcgctccttgcggcgggcgccttttacattgaaacggtttttaatcagaaatacgtaaatcgggccgagaataaacataataaacggattgcgataaagtctgtagcgtatttttgtccaggctgacgcttcgttatattccttgacggtcatcatccaaatatcgccggtgccccgtttatctaagttgctgcttgtcgcatgatgaatggagtggcttcgctgccattgaaggaacggaaacagtgtcagcacacctgaaataaacccgaacagccggttcagcttcttttgtttgaaaaaggattggtggcagcagtcgtggaaaataataaagattcttgtcaaaaatcccgctgctataacagtacaggcgagggtcagaagataggagacattgaggctgaagtaagcaagaaaccaaagggcaaaaaacggcacaaacgtgttgaaaagctgaatgatactatgctttgtatcggcgccggaaaatgcggcaacctgcttttttaaagacgcttgtttttgagttgcggcgtgattgatcatgaatgtcatgtcccttctttttcattatgacctcaagtataacggggcgcccgacgcggttgtagtagcagccatcatgccccgaatatgacatttgtcatgtttggcggcagaatgctaatcaggcgtcatatggaaggtttctttcatatctgcacttctcaaagaaaacagcaaaaaagaacccggcctgttttcggccgagttctttttcatcatcctcacagcaaaatcacccgatacttcttcacatccaaaaactgcagaaactcccgggccagcatatccggcgcgtggtcttttccttcatgaagacgatattgaatcagaccgacgagcatggacgcgacatagtatgcatagagctttttgcccgcctgaatgtgcagaggctgatgaagataaaacgattgcagcgctctgaacatttccgggatgacgtcaggcactcctgaaccctctctcagaaaatgaacgagcggaaggccgccggacagcgccgaaaagagccggacgagcgcggcttccgcttcttccacggaacagtcggcaggatctccttttaccgtcaataatccgatcagatcccggcatgattgatggatgatcgttttcagcaatgcttctttgttggcgtaatggtcataaaaagtggcacggcggaggttgctttgacgggcaatatcggaaatcgtgatcgccgcgtactcttttgtttccgccattaagccgatcatggcttcttgcaaggcctgcctcgtccttgtcacccggcggtcggcgggctttttttcttcttgttccggcacccggcggccaaacagccagtaaaaccgtttttgagaaatcaaatcccacacctgtccgctgatttcttccggggatgccccgggctcctcattcagccagtacaacacaatggcatatgtgtataacgcgcggtaatgaatgtacatatcctgttcagtcggtgagaaatccgcattgaccggtgacagcagcacatcatgccggaacacatcttttaaaaaagcatgaacgtgaaaatacggcattttatgacggtccatcatcgtttgaaaaaacacccggtgccggtcaacaaaagacagtgtcggatgcactttttgccatccgccctgtaaatgaagcacatctttattcttcagcgaatcatacagcgcttcgctcagcccgtctttcatttcttcctctatatcctctaaaatcgcatatttatcttcgtaataaaggtacagtgtcccccggctcacgtgcgcccgttcggcgatgtccttcatggtcacacggcggatatcccgctctccaagcatggccaaaagcgcttgtttgatgtcatttgtcatagaatccggcataagagacactcctttcattagacagatcacggcaatttgtacggtaacgtatagatgcgtttacgctgtctttgccgcaaaaacacatcacattataataggccctgaagaaataaaaaagcaaccagaggaggaaaaccgatggatcagcatataaaagcagacatcaaacgcgtctttgcgcttcagaaaaaaaatcaaaaaacgctgcgtgcttcaacagccgggcagcgcagagaaaagcttcagcgctttttagatgccgtcaccgcacatgaagaagaaatcatcgaggcgatcagacgggacgtccgcaagccttatcatgaggtgaaaagagcggaaacgcagggaacgatcaaggcgattaaagataatatgaacaatctcgacacctggatggcgccgaaacgcgtcggctcatccgtcagccccgacgctgacggcgtattaatgtacgagccaaaaggccttaccttaattctcggcccatggaattatccgtttatgctgacgatggctccgcttgcggctgccattgcggcgggaaacagcgcgattgtgaagctgtccgattttacgatggagacgagccatatcgccgcgacagttattcgcgaggcatttcacgaagaagaagtcgccatttttgaaggtgaggtcgatgtcgcgacagaactgctcgaccagccgtttgaccacattttcttcaccggaagcacgaatgtcggtaaaatcgtcatgacggcagcggcgaagcatttgtcgtccgtcacgcttgagcttggcggaaagagcccgacgatcatcgacagcggctatgatttgatggacgcggcgaaaaaaatcgccgtcggcaaatttgtcaatgcggggcaaacatgtatcgcccctgactatctccttatgaaggaagatgtacaggacacctttacagatctcctgcagaccattgtcaatgcaggttttatggaggatgatcatacggttgaccgcaacaaattcacgcagattgtcaatgaccgcaactttaaccgtgtcaaagccctgtatgatgatgccattgaaaaaggggcaaaaacggcgttcggcggcgtattcgatgctcatgaccgcacgatttctccgaccgtgctgacaaacgtcacgcctgatatgaagatcatgcaggaagaaatcttcgcaccgattctgccgattatgaattacgaagatatcagtgaagccgttgattacatcactgaacgggacaagccgcttgccttgtatgtattcagccataatcaggagctgatcgattatgttctgcagcatacgacgtccggcaatgcttctgtcaatgatgtcgtcgttcatttcactgacgtcaaccttccgttcggcggtgtcaatacgagcgggatcggttcatatcacggtgtgtacggttttaaagaattctctcatgaaaaaggcgtattcattcaagcctctaaataaaaaaaagaatccgcgtgcgcggattcttttttattatttttttgccccgaatgcgagcagtttcgtataagtgccgacgtagagcgtgccgtcttcagccagaaccggggaggaaatgacattgctgtctgtttgatagcgccatttttcattcccctcagcgtcaaccgcatagacgtttttatcgtcagaaccgaagtacacattgccgtccgcatcaatcagcggcgccgttctcacaggcccgtccgtatagaaagaccagttcatattaccggttttgctgatggaaaacagctcgccgcttcccgaaccgatatacacattgccgttatggtcgatcgctaatgaagagctggagaaaccgtttaacgggaacgtccactttacagcacccgttgatgtataggcgtataagttgccgtcctggtttccggcgtaaacggtgccgtctctatcaataaccggataacctttaaacccgttggacgtcgtttttgaccatttcacttggcccgttccggaattgatcgcgtaaaagatattattgtacgttgccgtatacagagtgccgtttgatgctaacacgggagcggagccgaccacgccgtttgttttaaatttccacttttgcgtccatgtcgatggcgacgtcggtttaatcgcatagatatagttatccagcgtcgacacatacagcgtgccgtcagagccgatagccgcatcggaactcggcgctccgctcagcggaaccgatgttaaaatgtttccggtttctttgtcgatgaaatacagttttttatcgtgagaaggaagataaatgacaccgtttgttccgagcaccggagtcagcgtataggtcgtcccgaggttttccgtcacccatttcacagtaccgtccggatgatacgccgtcagcttcccgtcttttgattgaataaatactgtgccgtccccgtcaaccgcggctcccgcaccgttttgaggggtggccggaacattcttttcccattttaacgcgccatcggcagtgcttgtaaaccggctttcccttgaccagttgaacatcgtcggagacatcgcctgcgcgtcataccgtcccgccaagaaaccggatgccgcatgattttgtttaaataccgtttccgcggcttgagcagccgccggatgcagccattttgcccccggcagatcagaaaccgcccccacagataaagccgcagcaaccgcagcgccggccgccaatgttttcattcgcaatgaagctgtcttttttttcaatgtcagttcctcccgtttctattaaaaactgctataccgctttcatcataccataatcatcctatgaaatatttgtattttcggtagatttatagaacaaatgtcacatagcctgctgatgcttcggggatgatcgaaacgcggcaatataccacaccacattgacgatgaaagccgcgcctgaccaaacgaaaagaccgtaataaagagacagctcctgccctaaggaaattgcggtcaataacgccaccaacaagacagccgcgcaaatgataagcccgatcccgcaaaaaacagccatgatgattttcatgccacgaacaccgagaatatacataatgagcgggaccgcatatataacaaggatctgaccgacggcggcccacatgcccgcggaattaaaacgattcgcgttcggccccgtttctgcaagcggagaaagcgagacgaggaccggcaataaacaaaacatcagagcggaaagcaaggtcaccgcaaccgcaccttttttcttttgattcatgtgaatatcctcctgacaataacccggcttttttaccggtaatctgataatatgttatattttagcacgatatttacttaatttgagaatgttttgtcaaaaacgaatttacaaatccagaaaaatagatataataaacgttatggaaccgatattgattcataaagcgttatctaacaaaacacgaagtgatattatgacgtggcttaaacacccggaagaccattttgatgaaagaccttatcttgatcagggactcagtttccgcaccggaatttgcgtcggtgatattcaggcaaagtcagggcttgcgcagtccgtcatctccagctacctgctgacgatgcaaaaagccggcctgctggaatccgaacgaatcggaaagtggacctattacagaagaaatgaaaaacaaattaaagcctttgctgactatgtccagcaccagctataaccatgaaaggagggatttttttgttctaacatatctatttttctatatatgtagttaaataaaaggaggcatacataacaatgaaaaaaagcagctccatcttcattctatttttggcactaggggttttcgggattatcacgaccgagatgggcattatcggcgttcttccgcaagtggcggacagatttcatatttctgcttcaaaagcggggtggcttgtcagtattttcgcgttcatcgtcgctgtgtcgggaccgtttttgaccttgcttgcttcaggtataaaccggaaatacattctgcttttagcggtgctgatgtttgccgtttcaaatgcggtctacgcgtatacggcgcatttcagtgtcatgctggcgtttcggatcattccggctttatgccacccggtgttcttttctgtagcgcttgcggccgcggcccggcttgtccccgccggccaatccggaaaagccgtaacgaaagtcttttcaggcatcaccgccggctttgcgttcggcgtgcctttcacgtcttatctggcggatcgtctctctcttgaagccgccttcttattcggcgctatcatcagtctcatcgcgttcacgggcattcttctctttttgccatccatgccggtcacagaaaaaatgtctttcagaagccagctcggcattcttcgcaaaccggctttgtggctcaatatcgctgccgtcacctgtctctttgcggccatgttttctgtctacagctattttgcggagtacctcgggcgggtgtcccatatgatcggcacatgggtcagcttcatgctgatgagtttcggggtgattatgatagccgggaatttcgtcttcggtgctttgttatataaaaatatgaaaaagaccgtcatcctgtttccgcttctttatacagccgcctacttgctcatatacgggtttgggacgtctttcgcgccgatggccgtcctcgtcttcgtatggggcgccgttcattccggcggtctcattgtcagccagacatggcttactgcggaagcaaaggaggcgcccgaattcggcaacagcctgtttgtctccttttccaacctcggcatcaccatcggaacggcggcgggcggctggtttatttcacatttgggaatccatcagctgatgtggtgcggcatcatgtttgcccttctggctttcgggctgatcatgggacgcttggcatggggaaagaggctgctcgcagaagcttaagctccattgcaaaatccggaatgattacgtataatattccagattaaagcaagggagagaaaaagatacatggaaagaccggcaggattttggattcggtttctggcttacgtcattgatcaaatcatcataggaattccgatttttatcattcaatttatggtctcttttttatttgcggcaggcgttgcggcggctgaccccttcatgaccgaaaatcagtttaacatctcttttctggtgttcggcgtcattccgattcttgtgagctctattgtgatcagcatcttatatttcagcctgctcacagcctcaaagatgcaggggaccctgggaaaagcattgctcggccttaaggtcgtcaatgaagatggcggacgcatttccatcggccaggccttcggacgcgctttcgcctatatcatatccaagctcattctttatatcggattcatcatgggtgccttcggagagaaaaaaacgctgcacgacatcatgtgcagcacccgggttgtttataaataatgtccccaagtccgggccttttgagcccgggcttttttatgacggctgtgcccgcctgatgtcaatgccgccttctccgtcagcctcaatgcggatcgtcccgttcacaatgacagacagcggatggaactccgcatgctgatcagaaaaaatccagcggcggccgctcggccctaaaagcaaaaacgccccatcattgtaatcacccataaaatgaaacccgttttcactaagaggcgcatgctttctcaccggaatgccgagacgctgcagctccttccccgtcgataccacctcggcagccgtcagattcacctcaccgatattcagaacggactcaatcgaaaaacgttccgcgcttggcggcgatgtgtctctcgcgatgaattccgccagattgttggacggatctttaaaataaaaggaacgcgcctgaatatgggagaaatacacctcatcctccccatcttccgtttgaaaaacgactttatcctttatccacgccttcgcctcatcaaaacgattattcggaatgttaaacgcaaaatgatacgtcggttgagagtgagaatcggcgcgcctgaattccaactcactttctcccgccttgatggtaaacgaatccccggactcatcaattaaaggaaaacctaacacccgttcatagaagtgtttcgtctcctccaacgcacaactgtacaaagtaatgtgatttatttgcatgatcataccccctttggtttatactgccatatagaggggttgattcctactgtttcgattcaccaattgagaatccccctttcgcccggcgctaaacatgacaaacagcgccaaaccgcttataccaggcgttttttaacgtctaaagcaaaaaaagcagaaaataataccccatatagcttgacaaaaaataaatgttatttaataatctatatataattagaattattattgaaagataaagtgaatgctttgtctttttaatatatttcaaatcacatttcaggaggaagatattatgtctttaatcggaaaagaagtactgccattcgaagcaaaagctttcaaaaacggtgaattcatcgatgtaacaaacgaagatttgaaaggtcaatggagcgttttctgcttctacccagcggatttctctttcgtttgcccgactgaacttgaagatcttcaaggacaatacgctgcactgaaagaattaggtgttgaagtatactctgtttctacagatactcacttcgtacacaaaggctggcatgacagctctgaaaaaatcggcaaaatcacttacgcaatgatcggtgacccatctcaaacgatctcccgcaacttcgacgttcttgacgaagaaactggtcttgctgaccgcggaacattcatcatcgatcctgatggcgttatccaaacagttgaaatcaatgcaggcggtatcggccgtgacgcaagcaacctagtaaacaaagtaaaagcagctcaatacgttcgtcaaaacccaggtgaagtctgcccggctaaatgggaagaaggcggcgaaacacttacacctagccttgatttggtaggtaaaatctaaggagtgcattccattggtacttgatgcaaatatcaaagcacaattaaatcaatacatgcagctaattgagaacgacattgttctcaaagtaagcgccggtgacgatgacacttctaaggacatgctggctctcgttgacgaactggcttccatgtcatctaaaatttcagttgaaaaaactgaattaaacagaacaccgagcttcagcgttaatcgtaccggagaagacacaggcgttacattcgccggtgttcctctcggccacgaatttacatcattagtgctggcattgcttcaagtcagcggcagagcgcctaaggctgatcaaaaggtcattgaccagattaagaacatcagcggagaataccgctttgagtcttatatcagcctgacgtgccacaattgccctgatgtcgtccaagcattaaacatgatgagtgtgctcaacccgaatatcacacatacaatgattgacggcgcggcattcaaagaagaagtagaaagcaaaaacatcatggctgttccgactgttttcttaaacggtgaatctttcggcagcggccgtatgaccatcgaagagattctcgcgaaaatgggcagcggcgcagatgcgtctgagtttgccgacaaagagccgtttgacgttcttgttgtcggcggcggacctgccggcgcaagcgcggcgatctacacggcgcgtaaaggcatccgcaccggtgtcgtcgctgaacgcttcggcggccaggtactcgacaccatgagcatcgaaaacttcatcagcgtcaaagcgactgaaggaccgaagctcgctgcaagccttgaagagcacgtgaaagattatgatattgacgtcatgaaccttcagcgcgcgaaacgccttgagaaaaaagacctcttcgaacttgaacttgaaaacggcgctgtactgaaaagtaaaacagtgatcctttcaacaggtgcccgctggcgcaatgtcaacgtacctggtgagcaagagttcaaaaacaaaggtgttgcatactgcccgcactgtgacggaccattatttgaaggcaaagacgtagccgttatcggcggcggaaactccggaatcgaagcggcgattgaccttgcaggtatcgtcaatcacgtgactgtgctggagttcgcgcctgaactgaaagcagacgaagtcctgcaaaaacgtctttacagcctgccgaacgtcactgtgcacaaaaatgcacaaacgaaagaaatcacaggcgaccaaaacgtaaacggcattacgttcgttgaccgtgaaacaggcgaagaaaaacacgttgaactccaaggtgtattcgtccaaatcggtctcgtgcctaatacagaatggttagacgaaaccgtcgaacgcaaccgcatcggcgaaatcatcgtcgataagagcggcgcgacaagcgttcccggcctatttgccgcaggggactgcacagacggcccgtacaaccaaatcattatctccatgggatcaggtgcaactgccgctttaggcgcatttgattatttgatccggaattaatgtaaaaagcgctaccctgcttacacggcaggatagcgctttttttatattaaaacggcatactgcatggcagtacaccgtctgaagtaattcaatctgtctttctccctctcgcccgatagataagaaacaatccaataaaccacagcggcgtcagcagcaaagccgggcgcgtcgcatccgcaaacagcataatcaccagaatgaaggcaaacagcgccagcacggcgtaattgataaacggcgcaaacggcgccttgaaagacgagcttgcgtgtaagtccggacgggttttcctgtatctgatatgacagacaagaatcacgccccacacccaaatgaaacagatcgcgctgatggttgtcacgatgccaaaggccgcttccggtatcaatttgcttaaaagagcgcccgctgacagcacaataaccgatatccataacgcgcggctcggcacatgatttttattcagcttcgcaaaacttgccggcgcctgtttcgttttgcttaagttatacagaatccggcttgttgaaaacatcccgctgttacaagcagaagcggcagacgttaatacgacaaaattaatgattcccgcggctaacggaatgccgaccagactgaaggtctttacaaaaggactttccgttgcattcagctgcatccacgggttaatacataaaagaatgatcaatgccccgacgtagaaaaataaaatccgcaatggaattttattgatcgcggacggaatattttttttcggatttgacgtttccgccgccgacacacccactaattccacaccgacataggcgaagatcaccatctgaaatgaaagcaaaaagcctgaaaatccgttcgggaacaagccgccgtgctcccacagattcgccgctgaaaccgttccggtatgcgttttgaacccaatcaccagcagaaccaccccgatgacaattaacgcgagaatcgtgactaccttaattaaggcgaaccaaaactccaattctccaaaaatcttaaccgttaacagattaagccctaataaaatgagcaaacagataagtgccggaatccactgcggaatatcaaaccaatatttcacatacacaccgacggcgatcacatccgccatagccgtcataatccagcaaaaccaataagtccagccggtgacaaacgctgcacgcggccctaaatacgcctcggctatatccgttaatgattggtaccccgctttagataacagcagttctcccagcgccctcatgacgaaaaaaagcgcaatacctacaataaaatacgcaaagatgatagaaggacccgccagctgaatcgccttaccggaccctaaaaacaatccggtaccgatcgtgccgccaatagcgatcagctgcacgtgccgattcgataagtccctctttagctctcgctgctccacatctgactcctccttacctctctagtgaacgacgagcaaaaaaagccaataaaaaaagagattggatgccctccaatctcatggtcataagaatatcaaattatatttgcgccgctgacaatcaacagcatgacaaatacatattcggtactcttctgtccttttgcctgagattgtgaacccttcggcgccgcggaaaacccgcggtctctccagaagccgctcctgctgtagtgcgacccacagcaatcatagcctgctacgtattgagtttccgatagaaataactatcagctaactttttattttaatggaagttgaatgcattgtcaacaggggtatacgctcacagcgttatcccggtccaatttttgatgcctgaagcgccgtatcttccgttttcattgtctcaaaaaggcgttatgcggtactatcatataaggtctaatcatttaaacattatgtcatactttaaattcactttatcatacaattgctcgtaaataaaaaggggatggacgagattggaaaccaaatatttagatctgctcgcacaaaaatacgattgtgaagaaaaagtggtcacggaaatcattaatctgaaagcgatactgaacctgccgaaaggaaccgagcatttcgtcagtgatctgcacggggagtaccaggcattccagcacgtgctgcggaacggttcaggaagagtaaaagagaagatccgcgatattttcaacggcgtcatttacgatagagaaattgatgaattggcggctttggtctattacccggaagacaaactgaagctgatcaaacatggctttgatacgaaagaggcattaaacgagtggtataaagaaacgattcatcggatgattaagctcgtttcttattgttcttccaagtacacccgatccaaattgcgcaaagcactgcccgcccaatttgcttatatttccgaagagctgctgtacaaaacagaacaagccgccaacaaggaacaatactactccgaaatcatagaacagatcattgcgctcggccaggccgataagctgatcaccggtcttgcctacagcacgcagcgattggtggtcgaccatctgcatgtggtcggcgatatttacgaccgcggaccgcagccggataaaatcatggaagaactgatcaactatcattcagtggatattcaatgggggaatcatgatgttctctggataggcgcttattccggctcaaaagtatgcctggcaaatattatccgcatctgtgcccgctatgacaatctggatattattgaagacgtttacggcatcaatctgagaccgctattgaaccttgccgaaaaatattacgatgataacccgtctttccgcccgaaagcggacgaaaacagaccggaagatgagattaaacaaatcacaaaaattcatcaggcgatcgcgatgatccaattcaagcttgagagcccgattattaagagacggccgaactttaatatggaagaacggctgttactggaaaagatcgattatgaccgcaatgaaatcacgctgaacggaaaaacgtatcaactggaaaacacctgctttgcgacggtgaatcccaaacagcctgacgagctgctagaagaagaagcagaagtcatggacaagctgctgttttctgtccagcactccgaaaagctgggccgccatatgaattttatgatgaaaaaaggcagcctgtatctgaaatataacggcaacctgttgattcacggctgtattcccgtcgatgaaaacggcagcatggaaacgatgatgatagaggataaagcttatgcgggccgtgagctgctcgatgtatttgaacggttcttacgggaagcgtttgcccatccggaagaaaccgatgatctggcgacagatatgacgtggtacttatggacaggcgaatactcctccctcttcggaaaacgggccatgacaacctttgagcggtatttcattaaagagaaggaaacgcataaagaaaagaaaaacccgtattactatttgcgtgaagacgaggcaacctgccgaaacatcctgaaggaattcggcctcaatccggatcacggccatatcatcaacggccatacaccggtaaaagaaatcgaaggcgaagatccgatcaaggcaaacggaaaaatgatcgtcatcgacggcggcttctccaaagcctaccaatccacaacaggcatcgccggctacacgctcttatacaactcatacggtatgcagctcgtcgcccataaacactttaactccaaggccgaagtgctgagcaccggaaccgacgtcttaacagtgaaacgattagtcgacaaagagctggagcggaagaaagtaaaagaaacaaacgtcggtgaagaactgatgaaagaagtggcgattttggagaaactgcgggagtatcggtatatgaagtgaagaatatggagttcagagatgattctctgggctcttttttttacggttacggactaatgagtccctttccctatacgtaaaacggatttaaccgcttcttcaatctcccgataaccggtacatctgcaaatattggactccagccaatttttaatcgtgtcatcacttgcattcggctcagtattcactaaagcatgacaattcatgagaaaacccggtgtgcaataaccgcattgaaacgcgaatttttcaataaaggccttttgaatcggcgtattgatcagtccttcaattgtcgtaatatcctttccttccccttctgccgcaagcattaagcaagatttcatcggcaccccgtccgttaataccgtacaggcgccgcaatccccatttaagcagcccggctttgcaccagttaatccgagacgaagacgaagagcaaataacaaagtatcagccggtctgaccgtcatctgtctttcctcgccatttactttcaacgtaataggatcagacatttggacctccttctaattcccgtaaggcatctaaaattgtatgttgcaagacaaatattcggtattcacttgagccttccgcatcatcaagaacgggtttgggtacatactgtaaagacctgcgcgctctatcttctaatgaatagcttttatcgttaagcacagcctccatttcagcagaacgaaacggaaatggacatacgccgctgaaagccattctgatctcatcatcttttttcagcgcacagactgtcaccaatggatatccgacattccactgctgtcttcttttgatactgacaaatggcaagtcaacatacgctcgatcgacaacgatatgaaataaaaaatcacctttttgcaattgtatttccttgttaaatactttatttataggatggtaatgaatccccgctctccctgcaatccctagcaaactatcagaaatcagcaacggcagcacggcctcacggtagtagatgcccccgcaaatgtttccgcccaggctgatcttatttcgagtcgtccgatcggctatttcacttactgttttacttaatagcggaaatggattttcttcctccagtttcgttaatgacacacccgctccgatcaccagttcatgttcataaaagcggatggtttgaaatcccggaagcgcgttcatgtctatcaccgcatccgtatagatgatattcagccttcctaacgtgataatttccgtgccgccggaataatacattggtgttttcttttcggccgcaagcgagtgaaatagattgattgtttcttgaatggtcttcggtttaaaataatcaaaatcaaacggtatcatctttccacccctcttgcgtcctccataattgttcgggaatgagaggaagttgattcaattggacacctaaagcggcggaaaggcaatttcccaatgcggccggcatccccagcagtccgtgttccccgccgccgcgcgctccataaggcgcaatcacatgcggggtttcaacaaattcaatgatatattcaggctgctctccatagtgaagggggcggtatgttctaagctgaggatttaatactctgccatatgaatcaaatacaaaggtttctcttcctccgaatgcgattcccatactcatcccccccatcacttgacccttgcagctttttcattcaatactgttcctatatccacaacagaataggcttttgtaattcggtacgtataatcccgtttatccaactcaacttcaatcccctgagcacctacagcccattcgggtcccggctttcctcttcccgtttcccggtctaaattcgtcatccgggttaatgtgtaattgccgctcgcaatgatttggccgccaatggtatttccattcggaaacgtatatccgtaagcaatgtcttttatgtcaacatgtacagaaggatgatctataaaataaacctttccgtcggccacttccaattcctcgacaggaactcgcaacacacatgatgccgcgtccttcagctttcgaatggcttcctccgctgcattcagtacggcttttccggccattaacgtccctctgctccccacggttttccaatgctcgggtgttgtttgtgtatctacaagcatttttacgtgaattttgcttatatccattttcattcgttccgctaagatttgggctaacactgtttttgtccctgtcccaatctccactatccctgacatcaaattaatgcttccatcaggattaaaggttaaaatcactccggacgttgcatttgtatcaaatgttgaggttttccaaatacagctgatccccttcgcccgtatcttccggccgtcgatttcaattcgctgtccctcgtcccaattcattaattccttcaatctttcaatacatttcggtacatttccgaccgtgcttgaattgagaagaacttgagtcggtgtggtgtcaccggggcgaatggcatttttatagcgaagttctaacgggtccatgttcagcttttccgccaatacatccatcgtccgctcaaaagcaaataacacttcagcatggctgtagcctctgaatgcacttggatatggatgattcgtatacatacaatatgaatcacacgatatatggtcgatagcgtacggacccgtacaatcaaccaccgcagcccggctgatgtccactcctttatcagagtatgctccgccatcaaataaaagctgaatgtccgccgcctttaaaattccatcctttgtggcccctaatttgacaatggcatccaatcctacatgaacgggagatgtgatcatatcctcttctctcgtattaaacaatttgacgggccggcctccgactgcttttgatgccaaataggcaatcacctctaactgaacggctgcttttcccccgtacgccccgcctactaaaggcgttttgacgataacctttccgggttcaattccaaaataccactgcattaattttttaatggcaaaaggggcttgagaggatgtggtaatgataatctcctcatccgcccgaatttcagcgatcgagcatcttgtctccatcgcagcgtgatcagaagggttaaaggaaatctggaattctgctgtcacatcactttccctaaatccgtcttcaatatttccttttctaaccttatccacgtttgcgatatttgtcttcggaaccgggaatacaccttttgtcttctcatagcggtccgcatgttcatgaacgagcggcgcatccttttgaaaggcctcacggggggaattgacgacgggaagaggtttataggatactttgatggcatccgcggcccttttagctgtaatcggattttccgcaacaacaacagcaaccggctcaccatggtatctgacccttttataagcaatcggcgatctgtctttaatttcttcacctgcaagcggaaaaggttcatcccccaatatcgctctcacgccgggaatcttccaagcttctgaaaagtccatcgacacaatatcggcatgagcatatggactggtcagcatttttgcgtgcaacgtccctgtttcttgaaaatcatccgtatatttcgctttacccgtcactttttcaagggcctctttccgaatgacactcttcccgatatactccaactcattcactccccgaatttattcagcagcagcgtataatcttcaactgtatcgacgtcataaaaaagcaaagggtcttgaaagctgatcatttttcccatattgatcatactttcacggatcacatgccgggcgccctgatctccctttaactgatgcaataccgggaaacattgatttgagaataaaatgggggcataggaagatgctgattttcagcggcgataaatgaataacggcgctctttttgataggaatcaattaacgtattgatgatatctgcggtgacaaacggctgatctgcaaggagaatgataacggcgtcagcctcgtacgctgccgctttttgcaaaccgcattgtatagaatggccttggcccttacccgcttgctcacattctgcctggctccacttatttgacatgggatctaaaaagaaaaaatccgaaagccaatgcagtgaatctccctttctcgtaataacaaaaatatgatctaattcagataacaaggcatttttaagagccatacttccgagggaaacgccattgagaaataaacttcgcttatccgttcccatgcgtctgcttgtaccggctgccaggtaaatgcctgctgttttcataggcgagacctttgttttcgcattttttgaatcatctcgccgacaatgcttacagcaatctcttcagggccttgtgccccgatgggaagtccgataggggaatgtatatcttccggaatctcacccccgcctaaaagccgctccgtacgccttctggggcctaatacgcctttataaaacacattctcgttttttaatgtatgtaaaatgatctgatctttttgaaagctgtgcgtcataatgacaacaaaatccctttttgtcatgctcaggcctttcatgacttcttcaggcgctcccgttatcaaatggccggcttcaggaaaatggccgtgatgacataaggcgggacgccagtcaatcaccgtcacatgaaagcccgcacgagccgccaacgaaactaacggcctcgcatcttctcctgctccgaagacatataaacaaggttttggcaccatctgatggataaaaaacaaatcagatgtatgttcatcccttttgattcccttctccgtctgtctcagtttttgaatacggccttgttccatcacatccccggttccaaacacgctgccgtcttcagcgatatacagatcttccttcggctctaacgtttcagtgaatcgcttcattcgggtcacagactttttttcatctaagcatgtcttgactgtcatcagatgccgttccaattccccttttacaggctcaagcaacaccgtcaaaacaccattacagccaatgccctgtccccaggataaatcgtcttccgcactcatatcaaagcggacaatcaacggttctcccgcagaccagacctgttctgccctttcaacgagatcttcttccagacaaccggcggataacattccgactcttgttttatcctctaaaatcaacatcgaagccccttctttcttataagcggacccctctgtttgaatgatggtagccagtaccttagctttcttagaattagcgatgacatccaaaatccggtgtatatcatccatctcatgtcccccgcttttacctgatcatatctgtatatccgtattctctttttccagaaaacattacaaacgcttcagcaatttcttcgtttctaaaaaaaaagagtctttatagaccttatgaccgggcggcgggtgcgacagcatgtcggagcggagagattccaataacacgttctgttccttctgtttccgattgtctgtttcaccctgctgtatgcctttaagatccgaaaagtattcacttaacacttgtaaatcattccccagctcccttttatcacttgaagataaagctccttctttttcccattcttttaacgttttcactatatttgacagatactcaaatccggcgttcaacttttgcatctctatttgatagcttgaaatgatgtttttatgtttttttctgacggggttgaattttaagctgtcagaggctgtttgcagcatctcttttgccgtatgcagctcctgcagaagatggttcattttatattccataaggttcccttttccttgtccccactctgattgcacccatttggaaaggtctgaaagtgcgtcggaaagctgacgggccaatgtttgaaaagagtccgctgccttttttgtgtagtccggcggaaaaaggaacatgtgaatcagaatggcgatgatgacgccgatcaccgtatcgatgattcggtcgaatgcataatctttagagtttcgttcaaacgtaaagaccaataaaatggtgagcgctacctgatgcagaaccgttacatctattcgtaaccactttgcaatgtaagtcccgcctaataggaacagccccagcatccagccattcattggcaagtgactgacaagaaaggacgttagcatgatcccaatcgcagttcccgcaatacgatgaaaagaaaaacgaatcgactgatctatcgttggctgcaaacataagataacagacagaggcgctaaataggggtgatcagagcccgccagttttgccgcttcccaagaaaccgcagaggcaatcgccatcttccaaaccaaagatgttttgttttgaattttttcacttttcatcatacgccccctcctttcagaaaccttttccactaggtttccgtgacggaaagggatttatactgtcgtgtggaaaatgcggaagaagctgttgttcgcaataaaggtgcttctctgagctcttctttacggtttctatcctccttgataacttcgcatcagatatgaaccctgctctcctatgactttcgaagggaaacatacaaaccttgttggttaatgtgatgaaattgggtgaattttttatcattttatatggtaaggctttaacaagcagaatgcctttgttagtatggcaaccaaaggaggaggatcaattatgcaaagcagaatgaagctaaccgcagtgaaactggcagccttggtattcctagcaggtgcctttgccctcccggttttacctcatgctgcggctgccgcaggttcccaagctacatacaaagttgaaaacctcaacgacagtgagctgaagatgacgttcaatcatgcagatgttcatattgacgctaaaggcaatgcaaccctaaaagacaacataacgggcgaggagcaggctcttccgaaaagctctactgacaaaaatggtgaccccgttacactgaaatatgaaaaaatcaaaaatggcgttttagtcaaagtcgtaaacaaagacgctggaaaaacaagcgggtcaatcagcacccaatcagtcgggaaatgtattctaggtactggcggcggtgcggtaactggcggcggcacactgggtcttgcaggagctgctgtaggaacagtcacaatacccggcatcggaacagtaggagcgggtgccgtcggagcaattaccggcgctgttggcggtgcaatgacgggagctgccgcatcttgcttttaatcatgaaaaaaaaagggcccgcgcccctttcttttactaactatggaaggtggtcgacatgtacaaaatcatcattccttcaatactagccatcttcattctctggatactcttacagatttcgctggagataagtatcgttaagaatccattgaattattttattgtattcattgtcttctttctctttataaagatggtgaaagagaagcaacagtaggttgcttctaatcagctgtggggaaccagattttagtggatctggtttttttgttttgttcactataagccaacaagtgatttcatagtaaatcgaatattgacaacaaatcggcctgctatacaagataatcgggacttatgatcttggtttaccgagtctttatataaaaagtattttcctttgacataagagcatccgattgattaaactcaaggctttatctccctagaaatatttagccgtcacagtttactgcgatatgggtattattttcttgtacggttagtagaataatcactttaaattcacttttagcaaatgcatttatataacttccccgcaaaggaataataatgtgtttatcctattgcctatacagcacagagggattaacaaaaccagcgttttatacctaggtctgttaacatgctatataaaataacataaaaattaaatgtaaaataatatagagaggctccaattaattcattatgtcattcaactcagagaattcatcttgcagaattctaaaaccttcgttaatattcttttcatatattaatcgtcttttatttgtggattcctgagaatagaaagaaagatctatttctactccttcatttttaaagagctcagcacttgagatttttgtgaatggtattaactgacccgttctaatatcttgtaaaacccctttaatttcaaataaagttaaaagctctctcaagtttttgtcgtgggataagaaaaatggtataaaatatcttccttcactattcaagttagagaaatattccattaccctcggagccataaaatcccaagctgtgttttcaattttttcgagtaattttttttgattaccacctttattaattttattaaatatcccaacagatttaggattcttgaaatatttaagcgcaataaccatttctctttcataataaattcctactttattttggacatattcaagtaacttaatcattttattttttgcatttttttttgaactgaactgtattttgataattccgatcagaagtaatgttaaattctgatgcatatctaagaacttctttaatgaacttttaccatccctagttttatataatttatatattatatcgtctactctttggatagcctcaaacttcgaaatttggtattcaataatattcttatttatgtatatatcattatcaatgcttttaaatagctctaaaaatactaaattctcgtacatatccctatgtttttttatagaagcatcaaaactcccattatctttaataattttattataattttctactaaatagaaattataatcataatgaaatttatgttttagtagagtatctatagttttgtaaatactttctttctcaaattcactactcccttgattgttcaaaaagcgaggaatataactagcataattagtatctaacatcacagaatagtcaataggaaatgatatacttccattaaataacatatcattcagtaattcatcatccatgtaatataactttccggtttgaaagtaagaaataaagtcttgatcaactgcatttaccaattctcccaatccaaccgggaaagtatctttatcataattatctaggtttatactcaacttaaagtattttaaatgttccttgtgcttattccatactaaaaatacttcccttggtgtttctgccgttgataaaaaataaatcacctttcttaaaatcatttcttctttcatgtatttactccttaataatttgttttcaaatttgaaagtaaattatttgattcacatttattatctctttttttctaaacaagtttattgagtaatattaattgctctagtctgtatatatttttgtgcttctgtcctaaccaaataatgattatctatggaagctttcttcaatattaaattattaactttggaatctataattgctaatttttcaaagtttcctattataagattttttatatatacattttcataatccatagattgtgaaagctgagtcagtataactttttgagttttggttgttatcatttttagcaatgctttaattgataaataccgtatatcttgatttttgtcattcttcaaacttaaagtgaattgaataatgatactacgaatatctgattctatatttttaaatgattcattatttatagcatttataatggcctttaagcattggattttttcaaactcatcctcattattaatttcacttaatagatttaataaatcaacattatctagttggcaacataccattttaagcataaaataattaatctttacggttaatgtcgaatatttttgaaaaagatcatcttttccttcaaagagatggttttcgtgtttaatcaaatattgatataaatctttaaaattataatcaatattttggaaattctgtttaatataaatagttaattgtaaagcactcaccttatcagaatacagtagattagttgcacataacgattcattacatacttgaagaacttcatttaatagatagttatcaactatttcacaaccctctttaatgatattttggattattagatatgggttttgcgctttcacactgtaaatcccatttttaccttgtttctcaatttgttccttgatctcctgaacataactcataatatggctttctcttttgacactagatgtttctaaattataaattttgcgatctgattcagacatgttacttaatacaacttgatttaattccgaagtacccgctattatctgttttcttaaatttataattgcatataagaggttatgacactggtttgctagattagaatctaaaatgattcctttcaacaaattctttattttttcaaggttttgagtagatatccctttaaaacttattattcctatcaaatttaaagcatcatcataaaagcgaaacatctttttttctaaaatttttatgcatactctagatatttcatcggcttcgattctattgatattttctttcaaagaatcaaatattaattttcccatagacactataaaagtattatcaatataattatgaatctcttccaataactctcttttgatacacatgtaatcttcatcgctaaaataataccctaaatgtttaaatacttctagcttagattttattctttctgattttaccgggaggcagtttgtaaaattataaatattttttacatcaatataattgatttttcctaatatgctattaaagtaggaaattatattttctgtttgcttgctatctccaactattactgccatttttaacagcaacactctgaattcccaattggaatattcctcacataattgaaatgatatatcttttattttatttctcaataataataattgagttaaagatccattaaaggcaccaacaatataaatgttagtcaaatatttaatataaacatctaaattactaccaaggttaacagtatacacagtttcagttttcttttttgttgatgctttattaatttctttatataatagcttttcatatctatcaattgatgggtaaaacagagattgacgcatactttctaactcttcttgtgcagcattcctagaggagaatttattttcctgatttaacttttgattttctatatttattaaatctatcagtatatcctgtgaaatccaatcaggcaacccactttccttacataagtcaaaagcttcctttaagtattttaatacagaatcaaaatcatcgagccagtaaaactgaatagctttccatcttaattttactactagatgcatattatcactttgctctttttttatttgctctaaaaataaatccccattgaattcttcaatacttttttcaccaaataatacttttagaaattgctcataaaatctatctaattcactcgtttctttcacttctttattaacagaaaatatcttttttccgatatatgcttttgatttatcaattccttgtaaaatacgtttctctagtgattcagaagctattgaacctatttctattttattctgttcagaattgtgaaattcttggtctatgagtctatttttacaatagtgtctataaatattacatatgtctgttattaaatctttaaatccttgatttgcaaattcattaaaactattaactatataatatttagctccttttgctccaataagttcttcttggatttgcgtaggtttactttctttttcattacaaaatagatatattgacttttttgggtgtgatttggctctagttatttctctaacaattgcagatgtaacatcatctttattatctattaagaatagacatacatcactatcatctagggcatataaataatcctgttctgcggactgtgtcgaagctccactttcctcaaatagatatacatcagcaatctttgtcgattcgataagtttttttagttgttttcttacttcatcatacctttcaaaaccttgtccacaccttgaacttataaaaactttaattttattaggtaacaaaatgtcattcttcaaatttcaacaccctctatagattatatttctattgtaataaacgttaattaaatgacgacttaaataatataaaatttatcatagtctctatctaagtgagatttgaatcatttttgattaaagtcttcgaaacatccctatggtaacaagcttaattaagactaatgacagttgagaattgatgtagctttatgtgaatttttttaaatctaatatagagttacttaagcataaaaaattaatagggaagctttatactccccctttactcttatctctataatattagtcttccttaccttgaaccatattaagtccggctctgtatagaaatggtgtccaataaggtttatgactaccctttttttcctcaaaaaatccaatagacactaattcatttgcaatatttattgtatcttctttgtttattagaaatatttttgaaagggtaccaacatcatgttcagttttctggtcttcaagtttttctatgtatttttttagatgtgcatattctgcataaattgtttgctctaaacgaattttggatactacttttaatgcgtccttcaaagcacttcgtcctatgatttctgaataagagttttctggagtaccagtttctaacaatttaatttgttttgccctagcctcattcattaaatgaatgagttctcttggagctgttatttttaatccatccttaacccgtccaatcatccatttaaatgtttcaggattctttcctacttcaacttttttcgggaaaatagaatagaatatttttttctgcttgtcactatcttttaatacatcatctttttccacattaaaaaatttgcaaagaatatcgttttcaagaatacgactaaccagtaaatgtaaaaaatcctgttctgaccaatcaatcgtcacttgctttgttatatgacttgcctccctaaaacccgttttagtaattcgtttccaaatatcctctctaataaagatttttaattttatatgtttgtgcagttttatattattgtaaacctgaaaaagtgttcttagagctaaggtttcaaattcaggttttccgggaaatgctacatcaagtctatcaaatgttatccaaacgcttaagtcaacacttttaagtgcctcattagccatttcaagaagttcaaaaattgatatagctcctaattctctatgttctttacttggttcatttaaagagattttcccttttaaaataggtatattagttgtaggttctacggttactactccttcaacttcttttacatttctaaagaattcaaaaacataatctctaacattcgtaaggagacgtcttatccctttaccttctaataaaccttctaattcaagtcttctaataaaatcttttacttcttcgcttctattacgaaaatctttgattttatcacctatcagagtaatgatatagatagaccataggtactgaaacgaggtttcagttaaatcagcatcaccaagaacagatttaaaaacaggtgtgccctctaggttttctgcaggtattaataaggtgtttttcgcagcaaaactaccctctttttttaataattgcatatataatgcacttttacctgaacctttcactcctcggactacatcaatttcccccatcaacaattgattccatactgccgtttcaacaaaatacgatgctaaattctcatcctcttcggctaccctctccccgaaacgcgagttcataagtaaatctatttttctttccaaaatggtcatcctttcattcataatatttccatatgaatatattataacaaaatatgatccttaacgattatttttatgctgaatacatcaagaaaatggtatttgcaaacctcactcacttatgataaggctccccacgattaatccgaaacgcccggtaaatctgctcaactagtatgagccgcatgagctgatgaggaaatgtcatttttgagaatgacagtttgtcgtctgcgcgcttcatgacggcgtcgcttaggccgagtgagccgccgatgacgaaggtgattttgctttttccataagtcgccagcttatctattgtatcggccagttcttcggatgttttcatttttccttcgatggcgagggcgatgacgtgggtgtccgggctgattttggccaggatgcgttcgccttctttgtctttgacgattttcatgtcttggtcgctcaggttttccggcgctttttcgtccgggagttcgatgatgtcgatttttgcgtaggctgagagtcgttttttgtattcttcaatgccttgcttgaggtatttttcttttagttttccgatggtcacaatattgatattcacaggtcatccccactttagaaacaagttattcatatatattgtccacaattgtggatatcttttctgtattttgtgtaggatcattcgttccctactagatatgttgcagtgtccccacataattcacaggctgtggataaactgttagtatgttcgatttttctgatttcgggcggaagctcatgatcatctatgtacatgtccagcacggtttcgatatgttcttcacaagaataataagcggttttcattgttacatcctccggttttcttttgcgcgcggcaattgttctcttttcaatataacctatttatacacatgttagtagtgcttcgggctgagttttatccacaattcggcaaatcacgcgcaaaaagagccggtgttttcagcatccggctctttacgtgttttctcttttttctaagcgaaggacgaacagaattcctaatagacacgccagcagcgtacagcatacatcaatccagtccggctttccgccgtttaaaaaagagttggttatcacggaaaccaggagaatggtgacggtcaccgcggcaagctttttcttcatcggctccctccttcatctgactgtcttctgcttttacggttcaaattcctctatttctttttcttgctatatagccttatcatgagggtcacaacgatatatacaatcataatcaatgccccgttactcacatcagggtatccaatcaacatattcattatgacaaaaacaatggttatacaaatgacggacaacaataagaagatactgaatgatttcaaatgaacaccttctttcccgcagtaacgtttcattataaaaagcttaccaaaagcggcaagctcttccgaaatgttcatactctttaaaacccatccatcacctgcacatcatacagcttgagatggcttttcggcgtgacgatgttttttaagtttgggatggtcaggtcgttcagctttttgcccgttttcaggtcgaaggattcgattttggcgggctttttgtagctgtacgtgaacagatacagctttccgttttgatgggtcagctccttgaagtcggccttcattcgtgatgcggggagggtgaaggcctttttgctttttccggtctcagggttgatgcggtagacggttccgaagccgtcaacgaaatagaagctgcgatgctccatgaaaaagctttttttgaagctgaacggcatggagtcatagatcgtctgttcgtcatttttataagcggcgatgtcatacgttttgatggcgccgctgtttttcatgactttcaccatttgatagatgtgatcggctttttctcctctggtaacaaagcagacagcgctgtcgtccacggcgagctgggattcgacagacgtgccttctttatacgtccacgtcgcgattgatgttgtatggagcttttctttatcggcctgaatgtcttggacgtgatagcctttttcgtcatctgtcggcgtgagcgcgaaaagatgatctttaaaaaagcctgaggcgcggatatagtgcgggatgacgtcttgcttccacctgccgtccatctggcggtacagctctgagcgatagctgccgccgctcttgtcgtagcccgaattatacagcgtgtaaaagcctttcgcccgttcgatatatcccgcgctgtctcccgtatgctggtacgctcttttatacgtgtgaaggccgtcctgaacggtgtagattccttttttgtcctccagcagcacgctttcgtcatgcactttggccgatccgagctcaagccccttcatttgataagaagaaagccgccctttttcatcggcgaagagggcgtagctttttccgccgccgaacgtgtcttggtcagccgcagtggagaaatacagcaacgcctctttatctttcagaaaatcagggtcatttaatgtgtctctcgcaacctccgcagggtcttccgtgcggaaatagaagaagcataagaccgctgcggcggcgatgatcactaagggtatccagatgatttttttcacgttgttctccttagtgaatggtcaggatcgtggttgtgtaggacgagcttgtgatgtcgcgcgggtatacgcctaagccgccgttagagtcgatatcaatccccgcttttaaaaggaatgccgaccacagcagttttgagcagtttttggcgccttcatggcccgtatttctgttattgacgaagttgaaggagtactcatcacccactcttgatacggcccagtcagcggcggcttgtttttgagcatcggtaactttcacggtctggacgattgaattgtcttcgacttctctgccgttataagcaatctgacggacgccgtctcccggcacggattcgacaattttatcagcggatgaatacatgccgacatgcccgtgattgtaataagccgtgtatgagttcgtgtaataaatattgccttttgtgcttttcgggagttttttggttcctgacgatccgcccatcgcagagagtccgtctttggaagcgattacatttccttgcaccttgtctgccgtgatttcttgatgaaactgcttgagaattgcttctgttgaaacgtgcttctgtttggcaagctctttggcggattggagaacgtcttgaggagtcgtgccctgctgaaggtctgcgatttcttttgcgtagcgtggtatttctgtttctttcgcttttacattcaaaccggagaacgacagaaccatggtgaatgacagggcaaacgggaggacggctttgaacagctttttacacattgacttcgcctcttttctcaaaggttaatttttccacgttttcattatatgacgaaattgtgataaaaaaatatacaatttacagatttttaaaaattttataacaatatgtaaatcatatacataaatcattttcaaatatcaggaaatctggttatcatacaagaaagggggaggacatatgaaggacagaacgatcggttcgatgcgggtttccgcaatgggattagggtgcatgggcatgtcggaatactatggcagccagagtgaggaagagtcgatctccacactgcatcatgccgttcatctcggcgtgaatttgtttgatacggctgatcaatatggattgggtgcaaatgaagaacttgtcggcagagcgctcgccccattcagaaaggagctgtgcctcgcgacgaaattcggttatgtccgaagcgaaaagggtgagtttatcgaaatcaacggacggcccgattatgtgaaaaaagcgtgtgatgccagtctgaaacgccttgggacggattatatcgacctttattatctgcaccgggttgatccgcgggtgccgattgaagaaactgtcggcgccatgaagaagctgattgacgaaggaaaagtgaggtatatcggattgtcagaggcttccgcagaaacgatcaggcgcgccgtccgcattcacccgattgccgcgcttcaatcggaatattctttatggagcagggaagcagaggagcatgtgctgcccgcctgccgtgagctcggcatctcatttgtgccttacagtccgctcggcagaggttttctttccggaaagatgacgtcgacagatcagctggatgccgatgattacagaagaagaacgccgagattccagggagacaatttggcggtgaatatagggctcgtccaaaaatttaccgccattgcccgggaaatgaatatcaccgcgcctcagcttgcgctcgcatgggttctcgcaaacggcgatgacctcattccgattccgggtacaaaaaagaaacactacttggaagagaacctcgccgctctcgacattgtgcttccggaggatgtgaaggcgcggttggatgaaatgtttccgatcggcacggcggccggcgagcgttacccggaacaaatgatgacattgttagatgaataacaaaagaggcccatcgtgcgggcctcttttcatgacagctttttgctcataatgacatccgtctccaggaatcccgtcttctcatacagcttccgcgccgtttcgttatgagcgaacacatggagagaaatcttgcggacacccagatctttggctttgtcctccagccttgcgagcgcctcttttgcatagcctttgccgcggaaaggcggatgaaggccgaaatcataaataaatgcgtcctgctgcgggtggtccggatcggcgtgcagccacaaccagccggcattttcctttccgtccaatgtcagcgtccataaatagtgatcggctgtctccaagccgtctggaagcaggtcttcaaacgtcagctccgctaattccggcgcttcgtcaggcagccacgttcccgcttttaccttttcttcagcgtaatgcttggttgaatgagcgagataggactgaaactcttgtcctgtcatcggctgcagcgtgatagccattgaatcactccttacacgaaagcgatatcatgcagtattatccgaaggctccgttttccgccggttttatgatttgttcggcttgtgccgttgaaccagtttgtgcaaataatccaatcgaaatgagacttgccaaggctgctgagagtacaatgaatttacatgttttcattacgaatcccctccgttaatctcaaaatttggtcattggcatcaattgattcctgaaaatacttcgccgccggtttgtatttctcctgttttttaaaatgcgccgcggcctgatacgacaaatcggaaacgtcactccacagctctttccttcttaactcggcgaaagctgattcaagcgcttcttcattgcggtcaataaagacatgctgtaagatgcgcagcttttgggtgtatacgggctcgtttttttcttcagcggcattcagcgctttatgcagccaaaatcggccctcatccgtctttgcctgcttcaataacactctggccagcatgtacagactccgcaccgaatacgctgatcgcaaatgctccttttgatcaagagccgtttcaaactcgacccgcgcctcttccagtttttcctgtctttcatagcaaatgcctgcgttaaagtgggcgagcgcttcaatatgcggatcgcccgctttggcggcttgatgaaccgccgtctgcaggagctcttcggctttctgatagtggaacaagtccattctgttacagccgatcaccattaaacactgtgcttctctgaccgcgtacatttcattggctttgtagatctccaacgctttttccgcgtggttcatcgcaaagtagttttggcggatttcatagtaggcaatcgccacttgataattaaactcggctctttcaatctcattcggtatgtgccggagcctgctttcagcaatccggtaaaaattaatggcgttcataaaccgtttacggtaaaactcgtgcattccggaaaagaaataataatagtattgaatcatctggtctgttttttctttatcggcgttcagctggatcgtttttaaaatgccgtctgttttctcatactcttccattaaaagcttatagcgggaatcaattaaattaaaataaaggagcaccgtttgattttgtgtcatattttgcagatccgtaagcagttgttctcttaacgcctcagccgattcagtgttgtgctttttgatttcctcataccagtcactgatttttttcgcaactgtttcgtgggccatcacctcagccatctgtcaggacacctccctttcccattttgtgtaataaatatatcatatttacaggtccaaaaagagggtggcagcccgctagtttcctcgtggcaacaaaaaaaacctccgcaggtgcggaggcgcatattttataatagtttttttcctaacaaagattctaccagctcgaccgctgttttgccggttttgtttttgtgatcgaggatcgggttgacttcgacaaattcagctgaagtgatgatgtcggcatcatacagcatttccattgccaaatggctttcacggtagctgatgccgccgacgacaggcgtgcctacgccgggtgcgtcgctcggatcaaggccgtctagatcaaggctgaggtgaacgccgtcacagtctgacaggtagtcaatggtttcttcaatgacctttgtcatgccgaggcggtcaatctcatgcatcgtatagactttcatgcctgtttccttaatgtattcacgctcgccttcatcaagcgatctcgcgccgatgatgacgacgttctccggcttgattttcggggcatacccgcccagattcaccaacgtgtcgtgcccgacgccgaggctgacggccagcggcattccgtgaatattgcctgacggcgatgtttccagggtgtttaagtcgccgtgcgcgtcgtaccagatgacgccgagctgtttatagtgctttgccgttcctgtcagcgttccgatcgcgatgctgtgatcgccgcccaagacgagagggaaccgctcattctcaatgacgctgtccaccttttgggcgagctgctcgttccccgagagcacagagttcaaatttttcagctcttcatcatgtttgagtttttcacgattgacggggatgtcgcctaagtcttccaccgcataccccatgtcagataaccgttcaatgagatgcgcgtagcggatggcgctcgggcccatgtccactccgcgtcgtgcttgtcctaaatccatcggcattccaataactgagatattcttgttcatccgtttttccacctcaacatgttgtatgttgtcctgtgcgggtttctcaaagatgacttggacacgaaaagatttaaagctctatctgtttttctgactgcttatgcttttttacatacagatgatagacgataacgcacaccgccatgaacgggatgccgcaataaagggcgagccgctgttctgaatcaaatgcgagactgatcagaacgaccgtatttaacgtcagcccgataataggcagcaccgggtacagcggtgttttaaacttcaggtcttccactttgccgccttcgcggatgtatttccgtctgaacatcagctgtgacagggaaatcgtaatccagccgacctgcgcgcttagtccggctaatgataagagaaacatataaacggtttccggcgctgccactttagacagcagggacaggcaggcgacggccagcgtcacgatcagagcgttcatcggcacgccgcgtttagttgttttgccgagcgatttaaaggcttgtccttcgttcgccatggcatataagatacgcgtcgatgcaaacaggcctgagttggccactgagagcagcgcaattaagataacaaagttcataatatcggccgcatatggaataccgatttgttcaaacaccacgacaaacgggctttcgaccactcccgccttcttccacggaatcatgccggcaatgacgatgatggagagaacgaaaaagacaagcgttctccataccgtctgccggatagagcgcggaatcgttttctcgggattttcactttctcccgcggcaaccccgatcagctccgttccctggaacgcgaagtttacggtaatcatcgtaataagcatagccttaatgccgttcggaaacaatccatcctcataaaaatgagagaagaaaggagcctgctcgccgtgtttcatgtcgatcaggccgaacatggcggcaccgcccaaaataataaacagcagaatgactaaaattttaatgccggaaaaccaaaattccgactcagcgaacgcttttgtggtaatcgcgttcaaaagaaacatcagtccgacaaacacgaggcaccacacccatacgggaacatgcggaaaccagcggagcatcaattgtcccgcagataaaaactcaatggcgcatgtcaccgcccagccgagccagtacagccagccgaatgcgaaaccgaaagcggggctgatgaatttggttgcgtacgtctgaaacgaccctgatacgggaagggcaaccgcaagctcgcctaagcagagcattgtcaaaaacataataaaaccgccgaccagataagacagaaccgcgcccagcggtcccgcctggttaattgtaaatccggtactcaggaaaaacccggtgccgatcactccgcctaatgaaatcataaacaaatggcgcgatttcattgtgcgctgaagctgattctctttttgatttgtattcactattctgcaccccttcagcaacttgtattggaaccaagccggtgctttgaaaccgatttgctgtccaaagagcctctatttgtatatgaatgttatatgaaattcattttcgtacataaagatacattatactaaaatactgtctccgcgcaaatagagtgtgctgaattttttatttgtaaattccatacaagccgagggaaagcattgccgcatcaaggtattacgcgttttgaagcacgtttgtgatcttttggatcgcccagtccaagtcttccttggaaatcattaacggcggtgcaaaacggatcacggtatcatgtgtttctttgcataaaagcccttcgcctttcagcttttcacagtacgggcgggccgcttctgtcagttcaacaccgataaacaggccgcgtccgcgcacgtcttttatgatcgggttatcaattttctcaagctcttctttaaaataccggccaagctgaagggaacgctctgccagcccttcttcctcaaggacttcaagagatgcgagcgataccgcgcaagcgagcgggtttccgccgaatgtcgagccgtgggaacccgggttaaacacgccgagaatgtcacggttcgccgcgatgcacgaaatcgggaagacgcccccgccgagcgctttgcctaagatgaacatatccggtacgatattttcccaatcaaccgcgaatgttttccctgtgcggccgagtcccgtctgaatttcatcagcgatcagaagcacattttcttccttacaaatagcggccgcttcttgtaaaaatccttccggcggaatgacgatgcccgcttctccctgaatcggttcgaataagaaagcggctgtgttcggcgtgatcgcccggcgcagcgcttctgcgtccccgtatggaattaattttatacccggaagcataggtccgaaaccgcgtttatactcatcttctgaagaaagggataccgcaagcatcgttctgccgtggaagttgccgatacacgcaatgatttccgcctgattatccgctactcctttgacctcatatgcccagcgtctcgccgctttgacagcggattcaacggcttccgcccccgtattcatcggcagaatcatatcttttccggtcagcttggctgttttctcataaaacgggccgagctgatcattatggaacgcgcgtgacgtcagagtgattttatccgcctgatccttcagcgcctgaatgatcttcggatgtctgtgcccctggttcaccgcggaataagcactcagcatatccatatattgattgccttcagggtcttttacccaaacaccctgcgcttcggaaataacaatcggcagaggatgatagttgttcgcgccgtaatgtgaagtttgactgataatttcttgagattttgtgaaagctgacataatctgattcccccttgttttgtaatcattcaacattagatcttgctttccctttttataaagcaagttccgtgccaatccgaaaaaacgggatgtttcgccagcattctttcttttcctgcaaaatattccggcagtttgcgtgcaaacttcagccaagcgcaaaatttttttgcgtttcctgttcgatttattttaaaataatgaatgttaagacgattgagagggggaattgacctgcacacaaccagcgaattttacacactcgtgttacaaagcattctggaagagattgatgtcgggctgcatgtggtggatgagaagggcagcaccgtcatttacaataagaaaatgatgcagattgaagatatggatgaacgggacgtcctgcataaaaacctgactgatgtatttatgttttccaatcagcaggacagcacgctcgttcaggcccttcaagaaggcaaaacgattaaaaatgtaaagcagagctatttcaataacaaaggccaggaaatcacgacgatcaaccacaccttcccgattgtgcaaaacggcgagatcaagggcgccgtggaaatcgccaaggacgtcaccaagctcgaacggctgatcagggagaacatgcacagaaaagaacagaacagctacacgtttgacagcattctcggcaacagcccggtcattcaggaagtcatcgaaaacgcgaaacgggcaacccgtacatcatcgtccgtgcttttggccggcgagacgggaacaggcaaggagctgttcgcccaaagcattcacaacggcagccagcgctcaggcgccccgttcatctcacaaaactgcgccgccctgccggacagtctggtcgaaagtattttattcggcacgaaaaaaggcgcctttaccggagccatcgaccagcccggcttatttgagcaggcgcagggaggcaccctgctcctcgatgagatcaactctctcaatctcagcctgcaggcaaaactgctccgcgcccttcaggaaaagaaaatcaggcgcatcggatcagctcaggacaaaccgattgacgtccgtatcatcgccacgatgaatgaagacccgatcaccgccatttcagaagagcggctgcgcaaagatttatactaccgcttaagcgttgtcacgctgatcattcccccgctccgggagcgcaaggaagacattctgcctctggccgaagtgtttattcagaaaaacaaccacctgtttcaaatgcatgtcgattcgatcagtgacgatgtgcagcaatttttcctggagtatgactggccgggcaacatccgcgagcttgaacatatgattgaaggcgccatgaactttatgacggatgaaacgacgattacggcggcccacctgccttaccaataccggatgaaaatcaaacccgctgacacggaaagcaaagcagccgcaagcacccagcccggcacagatttaaaagacaaaatggaaaacttcgaaaaatacatgatcgaaaaaaccctgagaaaacaaggcaataacatatccaaaacggcaaacgagctcggaatcagcaggcagagcctgcaataccgcctgaaaaaattcggtctggaccggatgaaatgaatccatacaaaaaaaggctgaggtgctcctcagcctttcgtttatatctgattggcaagccgctctccggtaaaccaaaagttctcactcactgccaatgtatgttccgtattctcgacttgatgccaccaatggcgcggcgcgtaaatgatttctcccgccttttgcctgaagcggatcggagacgccttttgcgccagcggtttttgctctatatctttttcatcaaagacattgatatttccttcgtacaaatacggagagtcgtccggatgatagaaaatccattccttctccccgaaaatgacgccgttccacgcgtgcgtgctgttaaaatcctgatgcagcggcgtgcctgtctgcttagaaccgagaaagaaccatttccagtcccgtcccgtttcttcatccgctctcaatgtgtcttttgtaaaatactcgggtgcggaatagacaaggtctaagtcattttggttcagctgcgtaaaattccagtcacagtaccatttgtcatcattctgatcaatgtactcgatatagttggaaagctttacttgtttaaacgttttgaccccttcgatatctgatttccggatggtgaccattctgtctccatagtgttcgtcaatgtattcaagcgtccacggcctgcattcccagtgatccattgcccccgtcaaaataaaaggtttcttatcagcatactcgcttacaaaaagatcgtacgataactcattgattgtcagtctgtcaatggtcatatccattccccttttattcggcaatctgccgttttttttgtttggcgtaactgtatggacctgaaaagatggtgacgttttgattctcaagccagaaaatcttgttgaacttctccagcaggtttctgtcgtgagaaacgcagatgatggtgccttgaaactgcatcaggctgttttcgagaatttcctgagattcaatatccaagtggttggtcggctcatccaggatcaggacattcagctttttttccattaagatggacagcttcagcctgattctctcaccgcccgacaggacggaaagttttttaaagaccgacgacccgtaaaatccgtacttggccagcatattccgggccatgccctcttcagtcagcagattttctttaaagaattgcagaatcgtctgactcgaatctccgacgtggctcttttgatcaatgtagcctatcttaagattttcccctactttaatggtgccgtccgacagttctctttccccgatgatgcagcggatcagcgttgttttgccgacgccgtttctgccgacgatgccgattctgtctttatgctttatacgcagattcacattttgatataaaagggaagatccgttggccacctttccgttttcaatgaacacaatatcttttgaaccggcgcccgcttcctgaaatgcgttttttaatttttgctccgtccggaccggcttattgatcagctcgatccttttcagcgccttttccatattattcgcgcgtctgtgcagcccgacagacggcggattcgagcggttggcccaatctctcagctgggcgatggattccttcatcttctgtatttttctctgctgttcttcatatttctcaaactgggcgatgatgaattcttcccgctttttcaggtattcgctgaaaccgtaaggccaaatcttcacctcggtatcgtcaatctcgagcactttcatcgccgtctggtcggcaaacgttttatcgtgggtcgtaaacagaatggttttattcgattttttaataaacccttcaagccactcaatcgcatgaacatccaaatggttggtcggctcgtccagcagtataatgtcgtcgttgcggattaaaatttcggcaaggccggcttttgttttttcgccgccgctcagctttgaaaacggctgatcctttaattcgctgaggctgagcccgttgcatacctcgtcaatcatcgcatgcatctggtagccgttgttccgctcaaatgtttccgtgtattgactgtacttttccaataaagcagtcagctcgtcctcacccatcggttccgaaagcttcagctcaatggccttcatttccttctggatcgccgcgagagcttcaaacgatttttccagatattgatacaacgtcagatcctcatggggatcagcgatctgcttcagcaaaccgaccttcgcccctttgttgatcgcaatcgttccttcatccgcctcaagctcccctgaaagcaccctgaacagcgtgcttttgccggaaccgttcggcccggccacaagcactttttcgccttcattgatgaagaaagaaacttgtttgaaaatggtatctcccgctaaatttaccgtaagattatgaatattcagcaactcacatcatccctttgtcattctggttcaaagctcgactttattctggatggcgacgctcgctttcagtttgtaaaagctgagcatcataaacagcgacaataagatggataataccccgattgcggtcagcagcaaagctgaatcaaaatagtccgttaagaatccgataaacggaaaggcaatgaacatgaagagcgaggtcatcaaactgataatggacagcagcgtggctctcgttctggacggaatctcattattcaccacctgactggatacgggttctatcacatcatagagcgcgttgatgacaacaaaagctgcaatcgtcacgtacagactgcccgaaggtataaacagataggccgccccgatgatgcagaatgtcagcagaagcacgcgcctcggcgtgaatttttccgccggctttgaagaaaagatggagcacagtgcctgcaagatggacagccccgcaaaaataatggatatattgcgcacggacagcccttcctgacttaacagatcttgtccgtacatataaaaaaccgatgtaatcgcaaagaaaacggagagtgacagcaccaaatatttaaaggctttgttcagcctgaagaaatctttgacttcttttaagatgtccccgaccgtctgcgtttcgtgttcactgttttcaaatttgatctccgtcagctgtgtaatgaccgccatcgcaatcagctgagtcacaatcccggcgataaacacatacgaccatgatatttcctgcaagtagccgccgatgcccatggcgatcgcaagaccgagtatgacaagtccgttataatttccgatggatttgccgtaccacttttctttcccttgttctttcagtgaatcaaacaaaaaggcgtgatccgttcctgatataaacgtcagcccgataccgtatataatatgagcgatgaagagggcgatgaagttatggaagctcaggaacatcaccaaatagacaatgaccataaaatgaccgagcaagagcgatttttttctcccgattctgtccgagatgacgccgctcggcacttccgccagaaacatcgccaaattcaggaccgattgcaggatgcccactagaaacaatgaataattcatgcttgttaaatataaaatccaaattccccgttcgaaaaagaagtttccgaaaaaaccggagaagtaaagcaaatttcgattccgcaaatgaatacccctttccagctatctgcatttaacatcatgaacagaaaggagcccgtcagtctttacactaaaaccctctatacatggatcttgcagatacagacttttcccaaaacaaattgggcaataatgagttgtattctcgaataacccaaaaagttccttctttttttcagatcctatggcatcaatgatcgtttttttcttccccggatcgctgatgtcgcgaatgaaatatttgatatagctcagctcatgcatgtaagccggcaggaacaaatgaagctcaatatcaaacccgcttttatccatatggtaataatcattgaaatgactgacgcgggagacggatacgtccgctccggccctccgaaacaattcagtcagcctttcaatgatctctccgttgggataataatcggcataaacaattcggatcggctcttcttttgtcaaaaggggcggatctttctgcggtgtccgtccgctttcccatataccgatcagtgaatcagtcggtgtgatgatatgccccaaatcgccggccagcttttgtttatcaaaataatgctgaatgaaagttctcagcatgccgtcctttaccttgaaggtaaataacatcggcaaatgattttctttaaaatcagcatactgccgatacctcatgttggaatgatgaaactgggtgtggcaggtcacatcggtctgattcgcttcgtacagccagatgcttttttccagatcatcattcaaaataaattggatgatctgaacggtgcggtgatccgcgggcgtcattttatattgcggattccgctcaaattccagtcccttctcaaacgtacgcttgaatcggtacgggccattttccggcacatcgcccccggcggtcgccggaatcagaaagctgctctgcaaaacggcttctatttcatcagacggctcgtccaaggtgacttcaaagcgtttttcgcccgttacgttcaccccgagctgatcggatgagacgaggccttttacatacggaacggcctgttttatgttcaggaaactgccgagatggggactttggttttcttttgtcagatgatagatgatcgtttgaaccacaccctcggcgtcacctaaatagtccgggtgaatgtccacctgacaggtgcggcgatctttgcggatgattcggcagttatagccgtcctgcaggctttcatacataatgctgcaaatcatcttgcttgtgtaatcctgcgtatctaatgggttcaagcgtatcgggcttgtgtcgatttctattttcagagggtcgcccggttttctcgccgtacgatgcatcgtcttcataaagcgctttccttttgagaaagcttcgtttctgtaatatgaagtccgtcaaagtccaggccgatgcgggtattcagggatttcgggcttccgcctgcaaggtatgtgataatgtcatgagacataaacgaggatataataccgtttgtcgctcctaacgaacctttgatcggttcatcggggtaacagttcagaagtccggccggcatgtttttttcataggtgacgccggattgataggattcaggcgtgagcagaggcccccattggccgctgaagctgccgacacccccggtcataaacgcgatattccgctccttacaatactgataaacccattcagaaatgttatggggtttgtcagcggcatttatgacgatatcaatttcgtacggatctaacacacgcaggtcctgcggctgtgtcatttcctgatggtaaagtgctgcgtccgcatggggattgatacccgcgatataatctctgcattctgagatctttaatttgcctacagaagattgagtatagacgaattgtctgttcaggttatgtactgatacggcatcgaaatcaatgagaataaaatgctgcatgcccgccgccaaaaggttttgaagaatgatcgttccgacgccccccagacccacgatcgctgccctgctgccgtctaatctgttttggatcagattggggttttggttgtatttctcaaaatggtacagctgcttttcagtgatgcagccttcacggccgttttgccatggctctattaaagcatccaatttcattaacgcatcgaaaaactggtttcccgcttcctctcccagaagatcagaaagctcttgtttttcacagccggtgatcagccgttcaaccgcctctttgatctcactcgtatgcgcaagcttaatcgcctttcgatattgaatgataatatgccccgtgtaggtcagcacctgcacgctgtctttaaacttccagcgcttacagtccgttgacatcatgacataccccctgaaagataataactccccaaaaaggggagtcacggctttactagcagcgatgcaccaagcttgctgtttctgtatcaagatcaagttcttcaatcttcatcagtacacaccccctttgccaataactagatattatcatcaatattggaaaaggacaagttattttttgaaaatttagaatttatatataaattgtgatatttcttccgctatcccggtttatcccggcagccggatgatgaacacggagccttttccctgctcacttttcacttcaattgttccgttatggctgtcgataatggtttttgtaatggcaagacccagccccgcgccgccggattgacgggatcgggaggtttccgccctgtaaaaccggtcaaacacatgaggcacatgctccggagcgattcccgttccgttatccgcaatcataagcatgattcctccgtctttctgcagggagacggtgatgacacccgtgtcttcatccgtatgctgcaccgcattgtaaaagagattgagaatggcctgcttcattttgtctttgtcaaaaacagcttctatcttttgatcaacaaagaactcgagtttccggtttctcgcaagcagcttcagctcagcctccatttccaaaatgacgtctcccaatgccccttttttcatttcaaagctcggctcccggtcaatcttcgcgagaaacaaaagatcctctatcagcttattcgccctgacggattccgcgtacatgctttgaagcgctttttctttctgctccggcttttccgccgctccgcgcattaaaatttcgataaagccgtgaatggaggtaagcggcgttctcagctcatgtgatgcgtctgatacaaaccgccggatgcgctccttcgcttctttttccgcctgaaacgcggtttcaatccgttccagcatctgattgatggagatgcccaatgactcaatttcggcctgcttcctatcaatcggcagccgtttatcgagactgccggcatgaatgtcacccatcatatgcacaatgcgggacagcggcttgagtgtgagccggatcaccggcaaaaaaacaaacagtccgataaccaaagccgcaaaggaaagtatcgcgaaaatgctgatctggcggaaaagcgaatcattcagaggctgggtcagcgtgctcatctgtacaactcccgcctgccttccgtcaacggaaatcgcctgaaacacgacgatgatttcctcacccgccttattgtgagccacctgatagtgaagcgccattgtatctgtcagcgcatcccgatacacgtttttcgggaaagaaggagcggctcccgcgtgcgggtcttctgataaaactgacatcttgtatgattgattgataaaagcaaccgtcaccccgggataaatcacattcggatgagccggtgtttcggaacgggcaggggttttgattgacctccatacgctttgatccattgaattgatatcactctgaatgctgatcgcctgattttcatacatcgtccgtctcataaacatgtactgtgtaccgccgatgaaacataacagcaaggtcaaaatcgccagtgacctgaacaggagctggaaccgcagggttctgtacagccgtttcatgccaggtccaccctgtacccggcgccccgaaccgtgcgaatcaccttgtgttctttgtccttcagcttttcgcgcaaagaacgaatgtatgtctcgacgatattgtcttccccgagaaccgttccgtgatgaagccccatcgttaaagaatcaatgagtgcagactcgccgtctgcactcagcagcttgatgcctttcaacttattcatgatgcagtctctccttagatgtatcagcctgtgtttatttttttcgcttccccttctattattcgcttttatctgaaacaaaacggaagctaagctgaattggtgaaagtaaacgctgaaaacggagccatctgcaaataagctgccggcagtttcatctgccgctattcagcagcaccagtctgtttcaatcacaaagttctaaggtcatgtctgcctttttctacatatatccattttcaactgaacgtgttgtgacccgcgttcagttcttttttatagcttctgaaaaaaggcataaaaaaaagcgcccctgaaaaaggacgtttaatatgacatgtttcattttcttaaattctgcattctaaaataattcttccttcacattcaccctcgatttcattcaatacgatgatcacatcagccgttttcatgtgtttcacctccctgcttcacaatagtataatattaacaaataaatcaataaaaaacagcccggatgtccgggctgcttttttatttctgtaatcgatctgcttctgtcagtttgacttccgctgtttttttctttcccgaacggtagaacgtgatgttcacacggtcgccgatctttttgcgatacaggcgctcacggagatccacaacgtcattgaccttatgtccgtcgaacccggtaatcacgtcgagctttttcaaacccgcttttccggccggtgaaaacgcgtcgacacccataatgaccgccccggttttaacgcctttcggaagtttcagcgtctggctccaatggtagctcgcaatatccgttaaggatttcatctcaataccgaggaaaggccgtcggacttctccgtatttttctaaatcctgaataacgggaatgacaagctttgacgggatggacaggccgattccttcaacggcggattcagcgatcttcattgagttgatgccgaccaccttgcccgaaatatccatcaaagcgccgccgctgttgccgggattaatcgcggcgtcggtctgcagcacttccgcattccaatccggatgtccgtcgccgtttgagtcaacgggcaccgctctttccgtgcctgaaatgatcccctgtgtcactgatcccgcaaattcaagtccgagcggatttccgatcgcaatgaccggttctccgactttgacttgatcagaattgccgaactgggcggccgatttgattttatcagacttcaccttcagtaccgcgagatccatcagacggtcgctcccgatcagctcagcaggcacgcgcgaaccatccttcaggctgatctcaatctcagtcgcaccttcaatgacatggtgattggttacgatataagaagtgtttccgttctttttgtaaatgacgcccgacccgcttcccgcttcgccgccctctccccaaatatcagtcttttggatattgagaacgccgactaccgaatccgatacacggctgaccatattcgtgacagcgtcattgacatttacgttgactgttttcacctgttcgctgccgagacgccggctggtgcttttgctgctgtctccatggtctccgcctgtccagtacggcatcaggaaagccatgagcgcggccccgacgatgacgccgatcagacttgatagaaagtatcctctcttgctgcggcggggctgttcggaggcgtactgttcatcatcgcgattataatccaccctatctcaaatcctttcaagagtactcgatttgcttatagtgtgggtcagatcgcggattaataatcatgattcatttggaaaaattacacggcgcacagcggcgtcggaattttcggatcggtatcaaataactgaaacgtttccccggcgacaaatcctttcgcagccaatgtctgctgcacggacattctcgccagttccttcatattgttgtcttggctcagatgcgccaaatagatgcgcgatgtgccgtcgccgatgacatcagtcatggcgagcgccgcatcttcattcgagacgtggccgacatcgcttaaaatccgccgcttaatgctccaagggtatctgcccatttgcagcatgccgacgtcatggttgctttcaaacacaaacacattggccgaacggatgatgcctttcattctgtcgctcacatatccggtgtccgtcatcagcgcgagctttctgccttggtagtggaaaacataaaacatcggctcggccgcgtcatgagagacgccgaatgactcaacatcaagcccgccgaaagactttacgctttccatcgggaacaaaaacttttgtccggtatcaagcttgccgatctgattctccatcgctttccacgtcttttcattggcgtagacgggtagaccgtactttctcgcaattacgccgagccctttaatatggtcgctgtgctcgtgagtgacaaagatgccgtcgacgtcgtctatcttgcggccgattctctccatcagcccgtccatcgctttaccgctcaggccggcatccaccagaaaagaatgctcctctgtctccagataaaacgcgtttccggtactcccgctcgcaagcacgctaaattgcaagcccattgtgtctcactccattatttattttgattgttatcaatgactgtgctttccaatgcattcacagtgtacgtttgctgtgtctttttcttcgtcccttttgacttatcttcaattgtaattctccataccggcgccagcacctgcgtacttgtcagcgggtattgggcaatatagccgaacttgacgcttttaacggcgcaattcgcttttaagtaattttgagaatacaataattcgaccgcatcaagctcaggaatcaggctctcggtctggattcgcttgaatgactccagcatggtctgctcgtaggatacgacctggtttttatcgttcagatgcagaatcacctgtccgatcgcatccgtggacgagtcaaaatcctgataaataaactgtccgtcatatgtctggtaaaaaatgatctgtttttgatccttgtcgactttccacagtttatatttttcaccgccggttactttagaactgacgagcgattccgcatcctcctgcggtttttgcttcgataaaccgaccggatcggtaaatttcattttcagcgttgtgaccttatgatcatccgccggcatttccattaacggcttttgatccttcaaagcatcaatatcttcagcggtaaataccttttggcccgccgtcagccggtagcccgtcgcggaatcagaagacaggttgccgaatgtgatatggtccatctccatgtctttttccacgtttgaatttttaatcacttcgtattcactgctcgagcgtttttcaaaaaactgatagccgagaaaaatatcgaggatgaggaaggcaatgatgaagatcgtttttgtcttattccactccattatcgtcctcctccttccccagcagatctttcgtaatcgggacgatcttcccgttgatcttcatactccagacgggttccagttcaacgagatcattcgttgaagaagagaccatttgataggacaggaagatctggtcgattttgttcacgtcgtatttatcctgctgctccagcagagacacaacctcattgccgttcatcatttttacgtcttttgttttaatcggattcggcccgagaacatagttcggccgcttgtagctgagaacctcgtcattggcccattgcagggtcaaaacaggtccggatccgaaaggcttagacgtgctgttgatcacaggcatttggtctttaaacatgtagaaactcagctgctggttatcactcacattgaaaaattgataatgatccgtccagcttcccgtatcctctaaatatttatagcttttcttaatcagctcacccgtttggtaagaagcgctttgtgccaaattccgatgctggaattgaatctgccgctgtgtcgaattgatttccagacggctgattccgtcagtcagcacattccgattgtaattcgggtcctctctgaccgtgctcggatcattaaaaagcgtctgcttaaacaggttcgtcttaatggtttcagtgataaattctttttccttcatattaaaccgcgcattcggcatgagaaattctttgctttttccgaccgaatagaggtggtataacggcatactcgactttttgctgtacagctcattcatcagattgcggtaattcgccgattccacagtcacttccaaaatcagctgcttgctgtacgagaccatgtaaatcttcttattcgtcttattctcattaaacggaataacaatatggtcaaatgagctgtattccattgacggatttgaccatttaaacatcgattggaagaaatcaatcggaatggtgtcattgaattgcagatcgagctttgccgaattgccgtttctgccgtaaagccaatttttaaaaccgagcttgtcgtattgatcggaaatatccttcatcccttttacttcccattgcggcaaatccgcccacaggtcattaaagagcgtctcatcatccactttataatgagagccgtttgtatgaataaacatatcccggggttttaccgtttgcgacactttttggctcgttttatcaattttatgcttttcccggacagtcgatttggttgaggccgtgccttctgaaaaattgggctggaatgtccaaattccccatgttaaaacaagactaatgacgaccagcactgacagtatgactgtttttatattttcacgcctcatcccaatcatcctcttgctcttctttatatggaagagtaaatgtaatcttcgttcctttgccttctacactgtcggcccaaatgtctccgccgtgcgcctgaaccatctcttttgcaatcgcaaggccgagcccggtgccgccgagttttctcgtgcgcgctttatccactctgtagaaacggtcaaagactttttccacatcttttttcggaatgccgataccttcatcttttacgctgatataaagcagctcttctttctcgttcacatcgactgagaaagtgacatgcccgccttccggtgagtatttcagtgcgttagaaatgatattatcgagaacctgcgtcactttatcctgatcaatctccacgtacagatttctgtccggaagctcgcggataaattcaacatgctgttctttcgtcatttcaaaacgatcgataatcagtgacataaagcggatcatatgaatccactcccgattaaactgataatctttgctgtcgaatttagaaagctgaagcaggtcgttcaccaatctgatcatgcgctcagtctcattttgggtcaccattaagaaacgcggagcgatatctttgttttcccacgcgccctctgcaagcgcctctaaatagcttcgcatggtcgtcagcggtgtccgcagctcatgagacacgttggcaacgaactctctgcgttcccgatcgagtttttcctgttcggtgacatcataaagaaccgcgattaaaccgtcgatttttccgtgctctctctgaataacggaaaaattcacccgcagtacagtcgtttcatcgtcacgttcgatctccagcagcattgaatcctgctgttctactaaatcctcaaatgtaaagttctcttttatgcccaataaagacgtaatcggcatctctaaagccgtttcacgtgaaacattcagcagctcaagcgcagggctgtttaaaagaataatagccccgttgcgattcgtagcgatgacaccgtccgtcatatacgcgataacggaagaaagctttcttctctccccttccgtcatggcttgggcatcttcaagctctctcgtcagatggttgaatgtcgttgcgagctgaccgatttcatcatgcccgtatttccgcacctttctggagaaattcccttttgccagttccatcgcctgcttacgcatatccgatagcggatgggtgatggtgcgggcgagaaatataccgagaagagccgtcagaacaagggctaagcctgttcctgaagcaagaatcgagttgacggttttcatctggttaaaggtatcttccatactggccacgacataaatcgcgccgacaacttcctgattctctgtgacgacaggttttgctgaaatcagcactctgtttttgcttttaggatcataatatttttttgaataggcctgttttgttgagaaaatccgtttaaaaatcgggtcagtcgtctgtttccccgctatttcctcgccataaggcctcgaagaaccgacgacctcatagcttttatcaacaaatgtaatctcccgtatttcattgtttttcgtaaaatcattcaaaatccgtttgacgtcatctttaatgacggtgctgtcattatctcctttatattcctgctcaatataataggatagattgtcaatccgctgatttaacgataattcataggacttgagaagagaattctccacctgtttcacaaagtacacgccgataatctgcatggcgatgataatgagaagcacatagatcagcgtgatcttaaactgaatcgaccgaaaaaaaccaaccttattcatcgccggttagtcctgttcaggatttctcaagtaataaccgacaccccgtcttgtgacgatccagttcggatggctcggattatcctcgattttctcacggagacggcgcactgttacatccaccgttctcacgtcaccgaaatagtcatagccccacacagtctgcaacagatgctcacgggtcatgacctgtccgatatgtttggctaagtaatgaagcaattcaaactcacgatgagtcagctcgatcgtttcttctctttttgatacgacataagcgtcagggaaaatgacgagagaaccgatatgaatgtcattagaagctgattcttcctcagccggcgcaaccgtaagctggcggcgcaggttcgctttgacgcgggccagaagctcacgcgtgctgaaaggcttcgtgacatagtcatccgctccgatttcaagcccgatgaccttgtcaatctccgagtcttttgccgtcagcataataatcggcatatcatattttttccggacttcccggcacacttcaactccgtctttattcggaagcataatatctaaaagaattaaatcaggctgaagctcctccaccatttccacggcttcgtttccatcgtacgcacaatgcacgtcatagccttcttttcttaaattaaactctaatatatctgcaatcggtttttcatcatcgactacaaggattttcttatccatcatcttgattttcctcctgccagaatgacttcatttcatctattgatgtttcatgatgatcacaattcgtatcgtgaaaaacgttccccgtctattataacggtttcaggtcaaaagataaaaaaattaaagagaacagcgcaaaaacgtattgaactgccatccttttgtcatgttttttattttcttttaaaaaataatatttttttgaaaccttaagaaaaaaaacgccgtctagtgtttgacgtcttcttctgggccggctgaaaagccggctctcccttttttataacaaaagaaaaaacgcacctactattgcagatgcgtttgggtaagtggctcgggacggaatcgaaccgccgacacacggattttcagtccgttgctctaccaactgagctaccgagccagatgtttcttttctatactataaagtaaagtaaaatggcggtccggacgggactcgaacccgcgacctcctgcgtgacaggcaggcattctaaccaactgaactaccggaccttacagtaatttgtccggagaaccgtatcgtggcggccctccgaggacaaataaggagttagcaataacgctaaagtaaatcaatgacccgtacgggattcgaacccgtgttaccgccgtgaaagggcggtgtcttaaccgcttgaccaacgggccataaaaagtggtgagccatgaaggactcgaaccttcgaccctctgattaaaagtcagatgctctaccaactgagctaatggctcttgatgtgtcggattatgtatcatagagcattgagacaaaagctttcttgcagtactctattgaagctgttccgtaacaacgagatttataatatcatagaacattcgaaagtggcaactacttttttgaaaaaaaatctattatttttttcctacataaaaaaacaagcctccgtgaccggaggcttgtttgctgcaaattcttagttagcgcggtatacactgcggatgacgttcgtttgtgaacggtcaggaccgacagagaaaatagaaagcggaatacctgtcagctgagatacgcgttccagataatggcgcgcattttcaggaagatcgcttaatgtttttgcgcctgtgatatcttccgtccagccaggcatttcttcatataccggttcacactctgcgagagctttcagacttgccgggaattcttcaatcacttcacctttgtagcggtaagcgacacagattttcaatgtttcaatgccagtcagcacatcgattgagttcagagaaagatctgtgattccgctgacacggcgggcatggcggacaacaacgctgtcaaaccagccgacacggcgcggacggcctgttgttgtgccgtattcgcgtccgacttcacggatttgatccccgatttcatctttcagctcagtcgggaaaggaccgtcaccgacacgggttgtgtacgctttagatacaccgacgacgtgctggatttttgtcggacctacgcctgaaccgatcgtcacccctccggcgaccgggttggatgaagtgacaaacgggtatgtcccttggtcaatatcaagcataaccccttgagcgccttcaaataaaacgcggcggccttcatccagcgcgtcattcagaacgacggatgtatcgcatacatactttttaatctgctggccgtattcataatactcatccagaatatcttcaattttgaagccttccgtttcatacattttttccagcagacggtttttctcttcaaggttccgttcaagcttttctgcaaacacgtcacgatctagcaggtctgcgatccggatgccgatccgcgccgctttgtccatataagcaggtccgatgccttttttcgttgtgccgatcttgttggcccctttgcgttcttcctctacttcatccagtttcagatggtatggaagaatgacgtgggctctgttgctgattctcaagttatccgtgctcacattgcgttcatgaagatacgcaagctccgttacgagcgctttcggatcaacaaccattccgttcccgatgacacacgctttttctttataaaaaattcctgatgggattaaatgaagcttgtacgtgacgccatcaaacttgatggtatgtcctgcattgtttccgccttgataacgtgcgatcacttctgcattttctgataggaaatctgtaattttaccttttccttcatcgccccactgcgtacctactacgactactgaagacatatatccgtgcacctccgttaacctttcaaaacgatatctcattcaaacaaattaagtgtatcagtgccgaaacagaaagtcaatcgtaaatccgaacattaaaatcttattattctatatttgttcgccttaaacctgattaaaagcgttttctctttcatttgctatctattactcccgaaactttcatactttaacacgaaaaagaacccatatcccgggttcttcagacagtcatttatattccgcttgtattcatcaggacgatccgccagccgtcaggatcttcgatggtcacgcctttttcttcccagtacgggttttcgggttctttctcctcatatcccatctgctttaatttcgtgctgatgcgaatgacctcctgctgatcagggatgtaaaagacaagcaggctgtcgccgtgcggaacgggcgccggctgagacgagccggtttcttcggtgaattctaagtgatattgcgtatgcggcaggccgaacatgacgccgctgtagccctcatgtccggaaaaactgccgaccctcttcaatccgaggccttcttcataaaacctgatgatttctttgagctgtccggtcggccgggcaatccggatttgcgccgcttgaaattgcggaaattcaattgtcatcatcatccctcccttaatgccattatataaaagcgctttctttttatcgactgccgaacagacggcattctctcattctttcggatgaaaaaaagcctcaagacattgcttgaggctttacgcacctgccggaacaccgccgtcatcaaagcgcctttccagatttacgaacttattgtattctttcacaaaagccagtgagacggtgcccaccgggccgttacgctgtttggcgataatgatttcgatgatgtttttgttttcggattctttatcatagtaatcatcacgatacaggaaggcgacgatgtcggcatcctgctcaatacttcccgactcacggatatctgacatcatcggacgtttatcctgccgctgctcaacaccccgggagagctgagacagggcgatgaccgggacttcgagctcccgcgccagcgcttttagcgcccgtgaaatttccgatacctcttgctgacggttgtcgctcgaacggccgcttccctgaatgagctgcaggtagtcaattaaaatcatgcccaatccgttctcctgcttcagccggcggcattttgaacggatttcgctgacgcggatgccgggggtgtcatctataaagataccgctgtttgacaggcttcccatcgccatcgtcagcttgccccaatcttcttccgtcagattacccgttctgagattttgggcgttaatattcccttcggcgcagagcatacgcatgacaagctgctcggcacccatctcaagactgaatatcgccacgctctcatccgttttggtggccacgttttgcgcaatatttaaggcaaacgccgttttccccacagacggacgggctgcgacaatgatcaaatcattccgctgaaaacccgccgtcatccggtcaagctcgataaagccggtcggaatcccggtaatatcgcctttccggttgtgaagctgctcaatgttgtcatatgtttgaacaagcacgtctttaatattttggaaggcgcccgaattttttcgctgcgcgacctccataatcgttttttccgcatcgcttaataaatcttcaacttcatcctcgcgcgtatacccgtcttgagcgatcgaggtcgccgttctgattaaacggcggagaatggatttttcctcaacgattttcgcgtaatattctatattagccgctgtcggaacggaattcgcgatgtccgtcaggtaagagacgcctcccacctcttctaacaaatcggtattcgcaagctctgacgttaccgtgaccaaatcaaccggttcaccgcggtctccgagcacgagcatggcattgtaaattttttgatgtgacattctgtagaaatcatccggaatcaacacttcagaagccagtgtcaacgcagacggctgtaaaaaaacagcacctaacacggcctgctcagcttctatgttttgcggcggcagccgatcattcagaaggtctgtcatgctaagcaccgtcctttccttaaaaaatatccaaatttcattttaccatttctcatgaaaaagaatagaaaaatatcactttccctgtatttgtcaggagagggttatgtgttttaccgttccgaatgccgggaaacaaataaataaatcgaaaccgggaggtaagaaggatgaaaacatatgcagtaacacccagtgttgatgcggacggatggtttgtgaaggtggaaaatgtggcgccgacggctctttgtacatcaaaggacgcggcgattgaaaaagcggagcagatggcgaaagagaacagcccggctaagcttgtcatttatgatcagcataaaaacattgaagaggaacgttccttttaagaaaagccttcgcccgtgcgagggcttttcttattcgatgaaacggatgtgcagcaccgtctgcgccatgagatcggccgttttttgatacagctcccattcttcaaaggcggcgaatactttcatcatgtcctgcaatgtctgtttcagtatgataaattcgtcaattgtccgcagttctgcggcttttttctgataatcagccagcttcagctgtaataacatcaatggcgattgcataaaaaacctcccccattctgttataaagccccgcttttcaaacctccattcctttgtcatatcctcttacgatagatttctgattttagtacaataaagaaacggaaggagtgatcacatgaaaccgctgcaaatttccgccgaaacggcgcaaaagctcgcagaatcactgaatatgccgcttgagagaatcatgcacatgcctcagcacattctgcttgccaaattagctgaaatccaaaaagagaacgatcacaaataaaggctgctctctcatatatatgtgcgggaggcggaagcgatggctttccgcctcttttttccatgaagaaaatttcggtaaaaccgtctcacagctgaaaaaacttgttgacgaaggaaaagtgaactatttcttattatccggaaacaattcaggcaacacaaagcttgtctcatggattaaaaagaacggcacaaaaatctcagctgaccgatacagcaccggaaaaacaggctcagcccgatgaggaatgacaggcggcccgggcggacaaagtcagcagactctgtatgagatgaaaaaacagctcggaaagaggctggatagttaaacaccggcctctttattttgctcttgaagcacctgccatgcggcgccggtatcattcagaaaaatgattgataaatcctttctatttttgaaaccatcagttcctgacgcagatgccggccggcataggagcgcgcttcttttccaagccgttccctgagagactgatccgtaatcagctttacgagggcatcagcaagttcgcggctgttgccgggctgacagataagccctgtgtcctcgtgccggatcatctcagggattcctccgcagtcagttgcgacaatggcttgacctgagaacatcgcttcgatgatcgctatggggaaattatcattcaatgtcggcaggacaaatatagatgattcagccaaaagcgccggcacatcatgtcgttttccgaggaaaaacacgtttgagaggcccagtttccgtctcttctcttccagaaaccctctcatgtttccgtccccgatgatccatatatccactccggataaatggtgccggatgcgggcgagagcgtccagcagcacatcatgtccttttcgctcggtcagacgggaaacgcacgcaatcacgaccttttcagcacgttttggctcgggtgcaacccggatgtcaatgccggtatgaacagtcgtcagctgagcctccttcgctccgtactccagcaagggctcgtgaaaggagtcgctgattgtaatgattttatccgaagcccgaataccctgcctttctatttcactgaaatatgcctcttctattgaacccttttggattttatgaaacttcatccggcttttcgtgaaatgtccgtgcggcgtaaaaaaaagcggatgccgatacgtttgattaaggtatcccagcaaaaatgccgcaaataaatcctgcgcgtgaaacaggtcatattgttctaagtccttctccttcaaaaatctttgaaagacatgtaaatagctgagattcttcacaaacttttcgtttgcggccccgtatctgccaacaagaaacgctctgatctcgtcagcggcccgcgggatatcttcctgaaaaaaagttggcggcatttggagcggcgagatgacatccgcctggtgaccgatgcgctcaaaacccgtcttaattgacgtgatataactcgccagtcctccgacattcgggtaacggagaaaggttgcgtacagaatacgcaatggcttttttcgtttgggggagctttttccttccgcacagaacgaatacagcatctccggctcactttgatgttcgatcccgtaaaattgatccatgacgcgcaataaggttagaggcaccagaccgttcggcttgccgatctctcctttcaaatccgctccccctctcttaaacttataatcctaattcccgtccccattttgacactttgtcaacatgatacggcagcagttctcctccccgattgtcgaagattctccgcaattgggtatgaagccctttctcaagtgttctctgcaaataagccattttataaagcgtcataggaggggtctgaaaatgaatgccccgctttttcatttctttcgtatacacttttacgcaatacgtccgaatatcttctgcgtgccggctccagtcttttctgaagccgagcagaatttcgaccagcaccgtcatatcaaaccaaaccggcgcgtactttgcggattcccaatcgatgaattgaatatcccacggttcatgtccggacgcatcgtgggtgcagatattctgcatatgaagatcaccgtgtgtgatggctgagccgttttggaccaattcagggaaaaaacccggctcctcctgctccagcaagtttgtgatttgccgataatgaggcttcacgatatcctttgtgcgctcatctttaagagctctatccaataattccgctgtctttttgatctgctttttacgcccttttctcatggtttccgattcgtatagcggcagccacgaccgccatttaccgtcagaaacagccttgttttcaaaggtgcggctgtgcagttctgcgacagacggaataatatacttgaaatgcttcggatgaaatgtaagctgtcctctgatctggctgacaaactccataaatatccacgtttcatggtcactttcctctataagatagatgtccggcagcaaatcccctaaaacagaacgggctttcccgtatatattaatctcgaccttgtttttttcacgtgaagatttatacaccttcaatatcagcggaacaattccggattttttctttacaaacagtttataaatggcgcttctgtctgttgatttcaggcatgtgatgtcatccggattcaccgcggccctttcaccgaacgaatacgacagtttttcgtcaattctcagtttttgaaatgcgtcatacaaaagatccttttcatacatgccgatcttccttccgcttccgtttccagctgtttttgagatgagaccaagtgtttctgataaatggcatcgggtcattccaagcaaacagagcgtactctttttttcctttaaatcctttccaaaaatcccggaacgtcatttctcctctttttcgtttcttcaaaaacgttaagaagtaacgcacctcataaatccagttgattccgtctttttgttcgagctggggcttcacatgttgtccggtcaaatacagatagtacatgtaaacgaaatgaatgcctgccggttctgtcaggctatggctgagccaaaagcgcggattaatttcgataaacttataaacattgtcccgggggtcctttttaaattctgccatgcctactcccttcagctgaatcgcttcaaaaaacggcagggtcttctcgattaaatcaggaagccgtttgctgacgacgtgggccccgcgccaaaatcagcagggaattgatggttcttttgcagagagaataagcccattaatttcatttggtcatcataaaaagtggcgactttataaaaacactggttgtctccggggatgatctcctgcacgagcagttctccattttctctgtaggagctgaactccttgcgcaattgtgcggcatccttcattacaattgcttttttgtttactttttttctgtattcatggccggccaccggttttaaaatacacgggaagtcaatattggcgatggcctcttccagctcatcccggttgttcggaaaaaaggttttcgggcaggggatgttatgcttgaccgctaattcatatgctttgcttttatctaagaccgtttctaacagagagcggctcgggagcaaaaataaaaaaaaaccggctaatgtctcgcggaatttagatataaatcccgcataatcatcagaacctgcatacagaaccggctttgcttggaatcgcttcccgaaatcagtcaggaatgtcagcagttcttcctcttgtgttaaagggctgggacatatcccgcaatctgccaatcttgattttccgatacgataaggtccctccgtgtcaaatgcgtaaacatcgattcctcttcgggccaggctgcgaatgatcccaatcccgtttgcactgaaatctagtacaacggctgcatgttcatgtttcatgatctccctccgagctgttggtattttgataaatcgattcgatattttttatcatcgtctcactgctcaaatatttctccgcgtaggcctttgcgtttgaagcagctatcttccgcgcagatttgttagtgataaaaaacgctaaagcccgggcaagaacctttgcatttcccggctcgacaataagccccgttttgttatggcggatcagatccggaatacccccgcaatcggtcgcgatgatagccgagccgctgaacatcgcttcaataatcgaaataggcagactgtcattaacggtcggcagtacgaatatgtccgtcatattcaaaatagcgggaacatcatctctttttcctaaaaaggaaaccatagatagattcagttttcgagcctgttcctctaaggcgctcctcatctctccgtcgcccgcgatcagcacttcaacatgctcaagtacatcagacggaattcgtgaaagtgcgtcaagcaaatgattatgtccttttctcgggcctaatcttgcaatacacgagatgatgatcttatttttcggcagcgggatttttcttttcccgcctgtttttgcatcgtaatcgattcctgtgatcaccgttgtcatgtcttcctgttcggctccgagcttcatgagcgggctgcggaacgtatcgctgataataatcaggcgatctgcgtattcaatggctttcatctctagttttttataataaaactcttctatcgatccttttttaaagatgtgaaatttaagtctgttgaaagtaaacatgccatgcggtgtgaaaaataaaggtttcttatagatttgattgaatctgcctaatatattggctgtaaataaatcttgagcatgaaacacatcatatctttccaaatgaatcttttgaagcatttgctcgtatataaacatcagccgattatttttcaaaatatgattgttataatccccatatctgtccttaaagaaatcttttaacttcggaacaacagccgcccgcagttcttttacctgtgcggacggaaacagattaggggagatgacatccaccttatgacccctcttcttcaggccttcactaagcgttttaatatagtttgataaaccgcccgtgtgcgggtagtcccaaaacgtggcaatcaaaatggataacttcttttttttcctgtataaccgcggaatatgatgttcatgtttcaactgtgtctttactgccgcctttttttgagggcgcgttttgaccccgtagtagcggtcaagcgtctggaccatatacggatacgggacggaaaatgtcttgatcatttccagatcctccgcacgacttcaaaagcttcggcgtattccacacccgccgtcatccctctgacttttcctaaatgtttaacgccttcatatgaacggggatgagggtaatccctcatttctacgtcatagtggtgaagcgccgcgagtttagcatccattgtgtctgtgatgttaacgaagtaattaggtttgaagagtttatcagccgtattcctctcccactcgcttgaagatagcgtttcgaacgtaagcagttcgataggtttttgattcggaagcggtctggcggctgttaaaactgcttggaatgttctctggtggtccatattgatatcgccgtaatgatgtgtaaagattttatcaggctgatagacgcgaatgagctgctctaattctttgacaagcttatgaagagggatacattccagctctaaattcgtatgctccaaaaagatgactttctcaattccaagctcttgattcgcgcgttcgcctaattgtttaatatgatgagcttcttcttttcttcctaatgccgtaataatggaaatcactttatatccttcattgatcagccgttttatggtgcccgctgctcccaatagttcatcatcgggatgagcgccgataaccataatgtattctgccattttttccacactccaccaaacaaatgttacaaatatcatatgacgaccctaaaaaaaggaaacttacatgtgcggattttcagaaacttacatgtgcggctgccattccaggtaacgtgacggatttaatttttttatagtattcaaaaactcatccgccaagccgtatttgtccagtccttttaatagttttacgggaaaccgggtaatagcggaaaaagctcttttatggtcgatgactttaagatttccgtgttcattgatcagaatgtgcctgatttcggcatcccatctggtaaaaccgattctttttaattcatccagcatatttaaaatatcagcagtcattttgacggacagggatttttcttttctgatatggcgggcaagagaggtgccttggacgtattccatcacaatataacgatctccgtattcatacagtcttggaatcaccggggaaccttgtccggtctttaaagccgccaattccttcttgcatgtccctttttcaaagaagtattttatgcatttgttgtgtgttaagcggtagacttccccgtcttttccgtctccgatcagcggataatgctccagcgcctttttattctccggattattaaaatatgtttcagaaaaaaatcgtttcataccgacacatccttcgttatgatgtaatataatatgcaatctggtaacgatcggaaatgaaacaatctcatcattttcttgcgctgcgccgtctgctgacatgaaaaaaacccgccggatcggcgggtttttcattgtgtattacgcttcttcttttacgtgaaccttcagcacagcctgaacttcagggtgcagctttacaggaacgtttgtatatcccagtgtgcggataccgtcttggagctccagtttccgtttatccactttaatcttatgcgttttttgcagcgcttctgcaatctgcttgcttgtgacagacccgaaaaggcggccgccttcaccggatttggcactcagctcaacagtcagctgttcaagcgtttctttcaaatctttcgctctttcaagctcggcaatcgcttcttttttctctttttctttctgtcctttcaatgcgctgatgtttgtcgcatttgcttcgacagcgaggccttttttaatgagaaagttatgtgcataaccgtctgctacgtttttcatttcgcctttttttcctttaccttttacatcttgtaagaaaataaccttcatctctgaacgcctccctcaaaatattcatcaatggcttccttcagccggacgagcgcttctgagacagaaatgcccgataactgggttgccgcattggttaaatgccctccgccatccagcgcctccataataatctgcacattgacctcgcccagcgatctcgcactgatgcacaccgtatgctcatcccgtctggctaccgcaaatgaagcttccacttcactcatcgataagagggaatcagccgcctgcgcaatcagcacctggtcaaagtactcctcttcgttctcaggaagagaagcaatcgcgatatgttctttataaagagctgtatgctggatcagtttcgcccgcttgatataagaaccgacggattctttgagaactttctgcaccagaaccgtatctgcgcctttcgctctcaaataagaagcggcgtcgaacgtccgcgagcccgtgcgaagggaaaaactcttcgtatccactattataccagctaacagggccgtcgcttcaatcatattgattttgagccgcttcggctggtattcaagcagctccgtcacgagttctgcggtggatgaagcgtatggctccatataaacgagcagcgggtctttaataaattcctcgcctctgcggtggtggtcaatcacaacgatgtgctcgattttgttcatgagacgctcttccatcacaagggacggtttatgtgtatcaacgacgacaagcagcgtgtcgtcatttgaaatctccatcgcctcttccggtgtgatgaaccgcgaccacagctcttcatattttttaatttcttcaatcaggcgctgaacgcttgatccgatctggttcggatcaatgacgatgtagccttctttgccgttggcctgcgccaccttcaatattccgattgcggctccgactgcgtccatatcaggaaatttgtgccccatgataatgacattgctgctttctgagacaatctccttgagcgcgtgagaaatcacccgggcgcgcacccttgtgcgtttctccatcggatttgttttgccgccgtaaaatttcaccttgccgttcggcattttgatggccacttggtcgcctccgcggccgagagccaaatcgaggctggactgcgccagatctccaagctccttcaaggaagaaaccgatgcgccgatcccgatgctgagggtcaaagatacagtgtgaacggatgttttttcacggatttcatccaaaatcgaaaatttcgcgttttcaagctccgttaaaatgtgttcatttaacaccgcgataaaccgctccgaggacgtccgtttcaggaaaatgccgtactcctgcgcccacgcatttaataatgaggtgacctggctgttcatcgtgcttctcgtttggtcatccagcccctgtgtgacgtcatcatagttatctaaaaagatatatgccagcacggttctctcattttcatactgcttttcaatctgaatctgttctgtcacatcaaagaaatagagcagccgctcatctcttttaatcactactttaaacttccgctcattcaaggtgatcgtttccgaatcgacctcctgcttgatcagcggcacgacggcctcgcatgtgtcatacagcgagcgcccgacgagcgtactttcattaaaacaggaagacaaaaacggattcgcccactcaatgtaatattgatcattaaacagcataatcccgataggcatttccattaatgcctcttcgcctacttttttcaatctatacgataacgtggagatataatcgtcaatttcttttctgatcagagaatccgcacgcttaatgaaaaacaggatcacggcgagcagcacaacgccgatggctcctatcagccagttaaagtaaatgctgatgaggattatgatgattgacaatgcaatcaatgcatagatgggataccgaaacaacggtttttcataaaaactaggcatttctatcaactccccacctgtaagtcacactcaatttcgcgtcaccttatttcttatgttaaagcctatgtcaatgatgcctaagaggagatacacggacaagatgagcggaaaaagcacacccagcacaattgctaaaacaggaacggctttcggcatctccatttcgcggcaatagaaaaaaataaacgctaacccttgaatacaaatcagcaagctgagaataaatcccccattcaatgaaaccgaatacagcatatgccctttttctaaaggcagaaaccctaatatcgtcacaataaaatacagaatgacaacgctttgcgggagtttgagctctctaaaaggcttcatcttcggaagatcaggggaaaatcgccgtaaaagcggccttgccatagcataactgaggaaagaaaaaacgatgccggtcaatacgagcactgtcggaaaaagatattgaaccgtgctcagctgactttccatcagcttgatctgcttcccgaactgatctccgtaaccgagctgctttgacatggtttctgctaaagacatcgactcccgaagctgggacatggtggtatcgatcacattcatattaagaaacacgatgctgaccacaaaaaaaacgacgccgcacagcacatacgccatagcgccggcagcaaccgcatagccgggctgtttctttttaaaataatatcccatggcgattcccgtacaggccgccgtaaaagcgcctgtaagcccggtaaacgaacctacaataaagctgacaggaaggctggcaagccccatccataccccgggcttcagaccgtgccgaatggtgtaaagaatgatcggcagcggcaaagcaaagagaagaattgcccccagtaaagggaggtacacgaccaaaagggaaatgattgcaaaaatactgatcaaaatggcgccttctattagagcccttgtatttttcacttactcacctcaaaccttgtatcattcgaacatacgaatagaaaagagcagcttagacgactgctcttttgacgccgcaatgtctctttcaagacctgaattttccataaactctccaaaatacacgtatatattttaacataagtcgaaatcgcaagtaaaatgagcgcggacagccgcaatgttccatgtgaaacatgaaaacagacaaacggacatccccgtgaaagaatgcccgttgtatcagtgatcctgatcatccataaaaccagaagtttctctgtttttctttttggtttttcgtacatataacaagacgataacgataagtaagagagtggtcgcctgtaaaaccccgctgctgaaaaggaagaagttctttatcatgtcccacatatagtttcacctctatttcgtatttcctttacattgagtttccctttctggaaacttcaaaacatcaggaacaacatcgggaccggggcatatgctgaaagtgaaaatgaaggataaaggagattcttacactatgaccgagcggagaacattagcatggcatgaaacgttagaactgcatgagttagtggctttccaggcaaacggacttgtgaaattaaaaagaacagagcgggacgtaagcgatgccagattaaaacagctttaccgattttccatccattcgctggaacaaaatctgcgtgaactgcttcctttcttccctgaagctcccgcttttcgtgaggatgaaacagaagagcgcgctgattccgcgttttacagcggcggtctgctgagcatggccaaaacgtctgtgcgcaattacgccggagccattacagagacggccacaccccaattgagacacgttttcgtcaagcacttaaacgcggccatcaagtggcatcaaatggtctttgagtatatggaagaacgcggtcaatatccggcttacaacctgagcgaattgctgaagaatgatgtgcgcaacgccagaaaagccatcgcgatgaaataaaaaaaagcagcaaggaatttaatcctttgctgcttcttatttttgagcggactgatcttgaggcgacgttttttcccggtatgtctcgagaaactcccggttggcatctccccatttcttcatttgcaaaacgatcggttccagcgacctgccgaattcggtaagagaatactccacctttggaggcacctgctgatatacctcgcgatgcacgatgccgtccgcctcaagctcgcgaagctgaagcgtcagcatacgctgcgtaatgctggggcaaatgcgccgaaactcattaaaccgcttttttccgccgatcatatgataaaacaaaatacccttccactttccgccgataacggaaagcgtcagttcaaccggacaaccttctttattcggatatatgttcatttttcatcctccatagtaccttttttgatactatatgctgattagcatctgacttacccagtattttactcgcaatcctcctcaccgctcaacaaaaatgcttctttttcacatcaatttttaaggttttgaagattacaccctccgcaagacgtgttaaactataaaaagattgtttacactacaaaaaaggacaaggagttattatggaaaaaattcttattttcggacatcaaaacccagacacagataccatttgctctgccattgcctacgctgatctaaaaaataaactcggcttcaatgctgagcccgtccgccttggacaagtcaacggcgaaacacaatacgcgcttgattatttcaagcaggaaagcccgcgtttggtggaaacagccgcaaacgaagtaaacggcgtcatccttgttgaccacaatgaacgccagcaaagcatcaaagatatcgaagacgttcaggttcttgaagtgatcgaccaccaccgtatcgccaacttcgaaacagcggaacctctttactaccgtgctgagccggtcggctgtacggctacgatcttaaacaaaatgtacaaagaaaataacgtgaaaatcgagaaagaaattgcgggcctcatgctgtcagcaatcatttccgactctctgttatttaaatctccgacttgcacggagcaagatatcgcagcggcaaaagagcttgctgaaattgccggcgtagatgcggaagagtacggcttaaacatgctgaaagcgggcgccgacttaagcaaaaaaactgtggaagaactgatttctcttgatgcgaaagagttcacgctcggcagcaaaaaagtcgaaatcgcccaagtcaacacagttgatattgaagatgtcaaaaagcggcagccggaattagaagcggctctttcaaaagtaattgccgagaagaaccttgacctgttccttctcgtgattacggatattctggaaaatgattcccttgcgcttgccatcggtgatcaagcgtcaaaagtggaaaaagcattcaacgtgacgttagaaaacaacacggcccttttaaaaggcgtcgtatccagaaagaaacaagtcgttcctgttttaacagacgcgattgcagaataaccaaaacaccccggcaaccagccggggtgttttttttacagctcgttcatcagacggccgtttcgtaagcgcttactctaaaattattttgacgcctattaatatacaatatataatatatcacatgtaaggcgttcatttttctaattattgtaagttgctgtcgcaacatcagaatcgggggtgtctatcctggaaaaacacgctgctctttcttattcacgaacaacaggcatttggcttgtgcttacaggagctatcttatggggggtctcgggaacggttgcccagtatctgttccagcaccgccattttaatacagaatggctgacttcggtgcgccttctggtgtcaggggcgcttctgctcggaatcgcgtaccgcaaagaaaaaggacggatatgggctgtttggaaagacagacgggacagaattccccttcttttattcgggattttcggaatgttaggtgttcaatacacctacttcgcggcaattgagcatggcaacgcggcaacagctaccgttcttcagtatttaggaccggcgatcattacatgctttttagcgattcgcgcaaagagaattccttcaggaaaagagctgctcgccgtcttattggcggttgccggcacattcattttggtcacgcacgggaatgtcggaagcctgtccatatccggtctggccgtcttttggggaatcagttcggcgtttgcactggcgttttacacccttcagccgcatcgtctgctgaagaaatggggatccgccattgttgtaggatggggcatgctgatcggcggagccgccctcagcttgatccgcccgccctggacatttgaaggcgagtggtcctttcctgcatatgccgcgattgtgtttatcatcattttcggaacgctcatcgctttttattgctacttggaaagcctgaaatatctgagtgcctctgaaaccagcctgctcgcctgtgcagagccgctgtcggcagcttttttaactgttatctggctgcatgttcccttcggaatatcagaatggctgggtactttgctgattttaaccaccatcgctttattatctatcaagaaaaaataacctctcttttttagagaggttttttcctagggccagagcacccttaggctcaattacccatatattaaaaggccttttttcattttactatcatccaaaagaggaaaatagaccagttgtcaatagaatcagagtctaatagaatgatgtcgacaagtaaatcatgcaggattgttactgataaagcaggcaagacctaaaatgtgttaagggcaaagtgtattctttggcgtcaccccatacatattttaggtctttttttctgtaacaaacctgtcatccatgaatgcaggaggatcgaatcggcagatcgcaaaaaaaggtacatacaaaaggagacatgaacatgaacatcaaaaaatttgcaaaacgagccacagttctaacttttacgactgcacttctggcagggggagcgactcaagccttcgcgaaagaaaatacccaaaaaccttacaaagaaacgtacggcgtctctcatatcacacgccatgatatgctgcagatccctaaacagcagcaaagtgaaaaataccaagtgcctcaattcgacccatcaacaattaaaaatatcgagtccgcgaaaggactggatgtgtgggacagctggccgctccaaaacgctgacggaacagtagctgaatacaacggctatcacgtcgtgtttgctcttgccggaagcccgaaagacgctgatgacacatccatctacatgttttatcaaaaagtcggcgacaactcgatcgacagctggaaaaacgcgggccgtgtctttaaagacagcgataagttcgacgccaacgatgaaatcctgaaagaacagacacaagaatggtccggttctgcaacctttacatctgacggaaaaatccgtttattctacactgacttttccggtaaacattacggcaaacaaagcctgacaacggcgcaggtaaatgtgtcaaaatctgatgacacgctcaagatcaacggagttgaagatcataaaacgatttttgacggcgacggaaaaacatatcaaaacgttcagcagtttatcgatgaagggaactatacatccggcgacaaccatacgctgagagaccctcactacgttgaagacaaaggacataaataccttgtattcgaagccaacacgggaacagaaaacggataccaaggcgaagaatctttatttaacaaagcgtactacggcggcagcacaaacttcttccgtaaagaaagtcagaagcttcagcaaagcgctaaaaaacgcgatgctgaattagcgaacggcgccctcggtatggtagagttaaacgatgattacacattgaaaaaagtcatgaagccgctgatcacttcaaacacggtaactgatgaaatcgagcgcgcgaatgttttcaaaatgaacggcaaatggtacctgttcactgattcacgcggttcaaaaatgacgatcgacggtattaactcaaacgatatttacatgcttggttatgtatcaaactctttaacaggtccttacaagccgctgaacaaaactggtcttgtcctgcaaatgggtcttgatcctaacgacgtaacgttcacttactctcacttcgcagtgccgcaagccaaaggcaacaatgtcgtgatcacaagctacatgacaaacagaggcttctttgaggataaaaaggcgacatttgcgccaagcttcttaatgaacatcaaaggcaagaaaacatccgttgttaaaaacagcatccttgaacaaggacagcttacggttaacaactaataacaacaaaaagaaaatgccgatacttcattggcattttcttttatttctcaataagatggtgaattcaatcatggcacgaaaatggcccgttgtaatattgatctttttgggtgcgttcctgtttgtcggcttactgccgaacaaaaaccacaattcctctgacacaaacaacacggagcataagaaggattaccgggcggcgtatcattttacgactccggacaaatggaaaaacgaccctcaaaagcctatttttttcgaggggaaatatcattactactatctttataatcgggattacccgaacggcaacggcacagaatggcggcacgccgtatcaaaggacttggtgcactggacggacgaaggcacggctattccgaaatacaccaacgaaaacggcgatatctggtccggttctgtcgtcattgataaacacaacaccgcgggcttcggcaaaaacgcgctggtcgccgtcacaacgcagccgacagccaaaacaaaagcccaggaacaatatttatggtacagcacggataaaggaaaaacgtttacttcctatagtgatcagcccgttatgaaaaacccgggaactaaggatttccgggacccgaaagtgatctgggatgaacaggatgacaaatgggtgatggccatggccgaaggagaaaaaatcggtttttatgaatcacccgatttaaaaaattggaaatacacgggcggttttatcactcagcagatcggcctcatcgaatgccccgacctttatatgatgcgtgcagatgacggcacagccaagtgggttctgggcgcaagcgcaaacggcaaacccgcaggcaaaccgaatacgtacgcgtattggaccggaaactttgacgggaaggaatttaccgccgatcaagaagaaccgcaatggcttgattacggctttgactggtacggcggcgtcacatttgaagacggtaatagcgaagatccgctgacaaaacgctatgcgctggcatggatgaacaattgggattatccgaatgaaacaccgacactaaaaaacggctttaacggcacggattctatcgtccgtgaaatccgtcttcagcagcaggacggcggcacatacagccttgtgtcagagccggttgaagcattgaaccaattaacttcttcaactgacagcatagaacacaaacaggtgaacggttcagagacactgccgatcaaaggtgatacatatcagcttgatatggatatcgcttggtcagatatcaaaaatgcaggcgtcagactcagagaatcagcagaccaaagccggcatattgatgtcggtatttcagcagaagacggttgtgcctatgtgaacagatcgtttacagaccagcctgataaaaccggtgcatacaccgaaagcaaagccccatttgacggaaacaaagggcgcgttcatctgaaaattctcgtggataaaacaagtattgaagtatttgcagacgacggaaaaaccgttttgacaaatgaagtgttcccaaaacacgaagatcagggaatcacgctcttttctgaaggcggctccgctgactttcagcatattgagatgaagcatctcggttcgattcattcttagacgtccctcttcatttctaaccggcgcccggactgtggtaaaatgcaaatatgtatactacgattcatgaggtgttccattggataatcaaaacaaagaacctgtgctgaaaagaaccatcatgcgggacgaagtgtatcgcacactcagaaactggatcataacgggcaagctcaaaccggaaacaaagttaaaggacaaggatttgtcggaaacattgggaatcagccgcaccccgatacgggaagccttattgcggctggaagatgacggcttggtgataacaaaagcgaacagatggacacttgtcgctccgattgagttaaaagaagcggaaaacttgtattccatcgtctggacgcttgagaaactcgcattgcagcaagccctcccgcgtatggacgatgccgtgattcaagaattgaaacagctgaatgaaaatcttcttcaaacgatgaaagacggcgataaaatggccgttctggaagcggataatgcatttcaccatcgcatcattctgcttgcggacaacgctgaacttcacaaattgctagtaagcctgaaagtcaaaattcagagactggaaatccgctatttcagtgaaaacggcgctttaaacagatcatataatgaacactctgatatcattcacgcattagaacagcaagatgccgccgctgcttttacagcgcttgaagcgaattggaaaaacagtttagaacggctgcaaaacatggcatagcaaacgaaaaagccaaatcactcatatgatttggcttttttacggatatcacaagacagccgcgttgcctgtcttgtttactttttgtttatatataaataaataccgtaatccgtcggcacagaagcataccccatctgtctgagcatggctgttatattcccgcgatgatacgttccgtggttcacaacatggaggatcatatcggccgctgcggttttcatgatgtcacctgacggatgctctatttcaagggggaggctgatattttcctccttctgcaaaaatagttgataccggtctgataatttcaaaaatagatcttccagctcttctatctctttagacaagatgtcctctttttgctgttcagctgatttcagcgtatcctccagacgctctccggagaacacatcaaaccaccccttatccgacagatacacatgagtcaatacaccggctatcgacggaaagacactttgaatctccttacggtacacatcctccggaagctctttaagccgggtgaatatttgctgatttgcccaaagatgataatcatacaattgcagtgccagatgtcccacattaccctctcctctctcgatatagaacgtacgttcctaattatactacactacatgccgctctgtaccattttcttcattcgcagctgagaaaatccgataaaagccgaaattaataagagaaggcctgcgccaatataaataaaccgcacgccgaatacatccgagataatccccgttccgataatggaaaacataaaaatgaactgaactaaagctgatctcgccgctaatatattgacccgtgtcttttcggtcgtgatattttgaagtaatgtttcctgcgtgagatctcgtaatacacaagccggccccatacacagcaccagaaaaagggccgtaacggcgcttgtgatcagcccgtaaataaacgtgaacattccatatgccaaggctcccgtcagcataagcggaatgagatgatgctgaagcttaccggataacttatagatgatcagtccgccgatcatcgtccctgcataatagactccgttgacatacccccaccaagcctctcctttatgaaggacgtcatgcacataagttaaggacacagacccgatccatatcatgcctgcccacgattcgatcacatccatcacaatgagaaccttgagctgtttttgctgaaataaatacacccagccgcttgccgcatctgcaaaaagggaacgttccctgactgctgccggcgcacacatgcgtacttgaagaaacagaatgatgcccaacaccgaagaaaccaataacatgacagtgacgatcattgtatcgctctctcccaggaacgctatgatgacgccgcccagagaccaccccgcaaactgaacggtctgatccgccgccgataataaactgttcgctttcgcccttcgatcaggaggaatgatttccccaatcagcgcgctttttatcggagcaaaccatccgttgcaaaaagaaatgcctccgatcagacaaaacagcagaaaaaagaatgcggatgaaccggtttggatgacaaaaaacaaacagactaacagtgtgatctgtatcaattgagaactgattaacaaagaacgaagcgtgaaccgaccggtgaccagcggcaaaacggcgctgcccaatacgcggcatacaatgctgacgagcgtcataagagaggccatcgccgtcgaaccggtttttgtaaacaaaaacaagatgacggccatcgtataaagtgaaaaccccaagttgatagcggtctggctgtataaaatagcgtaatacgctctcttcatattcatcctctgcaaccccactccctgattatgtaaatcataccatatttaccgatcagctttttttaaaaaaacagattgacatggagtccactccatctattaggctttattagcagatagaagactttcagcaaataacaattaagaaggggtgacagctgatttgacatccccaatctatagtgatgtatataagaaatgattttcaaaacagaataaaaaaagagggcttcctttccggaagccctcactcactccgtctgctacgccaataaaagaaaaataagcgctaaaacagccggaagtccttgttttacgataattgatttgtttgaagtaaagcctccgaaaatggccgcgatgaccacacagatgacgaaaaacatttgaatcatatggccaatcggatcagctccgaggatcagtccccaaatgaggccggcagccagaaatccattatacagaccttgatttgcaaacatgaccgccacattccgatcgccttctaaatgcttcggcaatttgaaagaccgcttggcagccttcgaattgataaaaaacatttcaagtatcatgataaatatatgttctaaagctacaattccgacgaaaacagccgcaattatgtccactgtccctctcctctcagcttcacttcaaccttatttccattgtgcgattgtttcgataggaagacggtaggaagcatatccttcgtctgccgcttttccgattgataacagcatgaccggtacataacgctctttatccattccgaaaacctcggcaatcttttctttatcatagccgccgatcgggtttgtatcatagccgtgcgcgcgtgccgtaagcatcagctgcatggaaacaagacctccgtcgatcagaatcgtttcacggttcacttgctccggcagtttttcaaaatgcgccgtcaacgcagcgatttgtctgtcttttacttcctgcggcatgtagcccagctcgaccgcttttgaataaatttcttctaaatagtcatcactgttcatatctgcgaaaaccgcgatcaccgcagatgatgtgctgacctgtgtttggttaaagctggcaagcggcgcgagtttttcttttccttcagggctgtcaatgacgaggaaacgccatggctgcgcgttaactgaagacggcgctgtcgttgcttcttccaatatttgagtcatttcttctttgctgatttttacagccggatcgtaattccgaatggaacggcggcctttcataatgtccataaaatcgtttgttttcagttctgttttcatgtgtaatacactcctatgctttcatattttctatattattctgcatctgcgacaatacgttttttaacatactgcgttcttcctcgctgacaccggcaagcatttcctttatgaaacgctccttctcctttttggaagcctcaattctctcccgcccctgatcagtaagccggacaagtataattcggttgtcctcaggcttccgccttcttgtgaccatttctttggcttcaagctgtttcaagtgtcttgtcacagctgcgccgtcaatattcacctttttctgaagatcgctttggctgatctcatcgacgtaaaaaagcacggcgagaagctcaaggcgggattggctgattccggtgcacgcttcaaacttcgtgccgatcactttgtgcagtgattggagctgatacaaaatctcgccttcctctgaacaacatgctgtcaaaacccatccctactttcttttgcgcaattaattgactagtcaatgtttgatatatcaataatatacatccgttattctttttttgcaagtgttttctcctttttaaaaaaagctgccggtgaacggcagctccttcttaatgattatggatttttctgaaattactgccttttacttcagcgacatcatataccgtcacaaaggcttgattatcaatgtcattaataatttccttcagtttggtttcttccaaacggttgatgacacatgtgatttctttgaatttttcatgagaaaaaccgccgtatgcttctttatacgtagcgctccggcccaattcttcacgaatggtctctaccattaatgcaggctcgttggtgataatctgaaatgttttagaaccgcttaagccttcctcaaccacatggatcaccttggatgcgatgtagtaagcaatgacggaaagcaatgcgccttgcagcccgaatacaaaagaaacaaaaataaacacaaaaatgtttaaaaataaaatgagatcgctcgtgccaaacggcaatttccgtgacagaagcacagccagcatatcaattccatctaaggcgccgccgttgcgcaatgccaatcccattcccaagccgagaataatcccgccgacaacggtgattaacagggtatctccctcaatgatagccggcgtgtggtggaaaaaactcgtgcccgcggcaagtgagacaataccgataattgatagaaacgcaaaacctttcccgatttgcttatatcctaaccagacaaacggtatattgatcaccgcaatcaagatcccaagaggcaaatgaaacagctgtgaaccgacaatgctgagcccggttacaccgccgtcagatacactattcggaatcagtacggtttccagtccatacgcggcaataattccgccgatgatgaccatgatgacccgtacgattgatttggctctgaatttcttacgtctttgtttttcgattgtactcatatcattccccgcttcaattattttgtcttatttaaatataccataattgatacttttcgttaaaaataagcctatcggctagttgaagcaggaaccgaggaaggagatttcacagataacgtatccatttatgactttaatcattcacaacgcaatcattcagtaaaaggaattatcatccattaatagtctcttttgtttcccttcttcacatattcccaatcatgctctatattttttctcacccgctgaagaaggctgaaaatggtttctttttcctcagacgtaaagccggacagtgctacttccgcagagtgctctccttctctttgcaataacggataaacctttctccctttttcggtcgggaacagtttttttatttttttattttgatcatcaggacgcttttcaacaaatccttgtatttccagttttttgatcgctctcgccgctgttgttcggtcaactttaatcatttccgccagtttttcctgtatcactcccgggttttcacatatacgcacaagatagagatactgcccttttgttaagtctaattctttaaattcaatattgctgatggaatccaatgcccgtgcgatcatgccgatttcacgcaaaatatcagtcatatcttttcaaacccttcatatttttgttgcacttgcaatataaatgtttcgtcgttacttctataagaccacaagcaagccgtgcagtccagactaatatgtgaaaagggttggttgatcatgaggatacaacagaaattgatttacaagcagcgcttgagattagaaaagcagtattcattgaggaacagcaagtacctgaatccgatgaatttgatcagttcgatacgcttggggaacagtgcgggcatgtcttggtttatcatgagaatcagcctgccggcacaggacggatccgcatcgtaaaccaaacaggcaagctcgaacgaatctgcatcctgaagccttaccgcaaatacgggttgggcaaagtaatcataagcgaatgagaaaacatggtaaaagaaaaaggcatcacccaatgtaaactgaatggacaaacacatccggaaggcttttatcacatcttaaatagtccgattaaaatctattaataattaacagttgaagagatggtgaaaaaagctgattctctctattatggactcctgccgcgttacattttttctatcttcacatatctttactattaagtacgtttaaattgatttcaggaggagatatgaagtggaagaaacgagtatggagccatcacgactctgcaaagaatttgcaagaattctcaattcaacgcccagtgtcgtaaatggcgtatgtacggcgacaagatttcgaagcaacattcacccggtggtactcggaagaagagccgaggcatttccttttattcctcaggccttttcatttgagagcatggactcggaaggcagagccttatgtttaggtgagactgttttactgcaagaagaagtgaacccattaatgagtgaactgcgcaaattcggtatcatcgtaactgccgttcataaccattggctgtttgataaaccgcgtctgatgtttatgcattttgaatcaattgacaaacctctcaattttgcaagaaaagtaagagaggccctaagagttctgactactaaaactgtgcgtgcggtaccaaaaactgacggggaaatgattgaacggcatggtctttgtgacgaattcaacgatattctgggcggaaccatgcatacgtttgaaaatggaatttgtacagtaatgagatcacgaacgaatataaaaccggttgtactgggacggcccggaagatcatttttgctcattccgcaaatgttttcatttgaatcaatgacaaaagacggccgtgctctttgcagcggagaaactgtaattctgcaaaaagaaatcaatccatttatcagcgctcttcggaaacatgatctgattgtaacgtctctacacaatcactggctgtttgacaaaccgagactgatgtatattcatttcgaagcgattgataaacctgtcaacttcgccttaaaagtaagaaatgctttaaaagtgcttactgataaagaggtcgaaggttagcatgtttctaagtatcaaaaagcgattcatataatcgcttttacatatgatcagccgaaaacaaaaaagaggtcagacatttgtgttaaaaacagccttataggctgtcgttttgtgtatattctattgatgagtttatactacttcatcccgcattccatacaagctctttatttctcaatggctttctacatgccgctgtgcaaacaccttcttagctactgaaagagcattaagtacacgcgggaagcctgtataaggaaccaattgggtgatactctctacaatctcagtcggtgttaatccggatgtaagccctgtattgatatgaagttcaagctgcggctcggttccttgcgttacaagggatgaaatggtaacaagcgcacgttgttgattggttaatcccggtcgtgaatatatatctccgtaagcaaattctataatgtacttacttacatctggagcgatatctttcaagtcttcagaaatctttaaatgcgtagaaattttatcatcgtttgttaaagtgtactccattaatttgtctaaaccttgctggtaacggctttgatccatttgaaattcctcctgaaaggtacttatttcctgacataagataatatatcgcagccctctctaaccgtaaaatacataaaaactataaaaaccattcatttttttcatgagtgatcttagtctacgtaattactcttacaaaaagatgaaatataccggataaattcgcgtactgcgtgtgaaacgtattttcctttttttaaaataatcgccactttccaaggaatggatggattgacaatggagattgccttaactaaactttgatcagtctttttcactatcgactgagggaaaatggaaatacctagttcttctccaatcatttcgctgataaaatcccattgagaactttcataaacaatatttggacgaaaaccggctctaatacactcctgaataatccgatcgtgaagagaaaagtcttcactaaacaggatgaaaggttcatttttcaagtcttgcatttccacaatctctttatgaacaagcgggtgagcggaatgaacgaagagcatcagttcttcattaagcaatggaatgatatcaaactgctctttgtccactggttcaataaccacgccaagatccagtactccatcttcaacctcctttttcaccttgtttcctccatgttctatcagcttgatgttcacatcaggatacaattgtttaaaccctctaatgattttaggaaaaaacaagacaccgatcagcggcggtattccaattttcacttttcctttttttaaatgcaaaagatcgtataagttcgtcgacaagtcatctaatgacttcataatcatttggccttgctcaaatacaatttcgcccgcatctgtcaaagcgatttgtctagcggatcgatcaatgagatcaacctttaattcctcttccaaacttttaaccatcttacttaaggcaggctgtgacaaatgcagattttctgatgccttagtaaaactgttggatttagcaacttcaagaaagtatgtgatttggcgtatatccatcgtatgatctccatttcatgagtttaacgaatacattatattctttttattcattttacttatacaactgccgggtgtaaacttttaggagaccaaaatgtttcctggaggggttactatgagtaaattattagaaagtaaagttgctcttgtgacaggcgcggctagcggaattggtttagaaattgcacgtgaattcgctaaagaaggcgcaaaagtggtaatttccgatttgaacgaaaaagccgtgcatcatgcagctgaggaacttaagggacaaggatatgaagtcctgcctgcggtttgtgatgtaacaaacgaagaacaagttgaaaaaagtttctctaagacacttgaaacctttgggcgaatggatattctggtaaacaatgcggggattcagcatgtgtctgatatagaaaacttcccgactgataaatttgaatttatgctgaaattaatgattactgctccttttagtgcgacaaaaagagcgttccctttgatgaaaaaacaaaaatttggccgcatcatcaatatggcttccataaatggtttaattggttttgcagggaaagcagcttattgcagcgctaaacacggtttgatcggtttaactaaagtatcagcattagaaggagcggaatacggaattactgtcaatgccttgtgtccgggatatatcgacactccattggtacaaaaccagttacaagatattgcagagactagaggcatttctatagaaaaggtgtttgaagaagtcatttaccccttggttcctcaaaaacgtttgttagccgtgcaagaaatcgctgattacgcagtattcctcgccagtgacaaagctaatggagttacagggcaggccgtcgtaatggatggcggctatacagcccaataatctaaatttcatctgcaggagtaatagtgctttgggttaaatgatttactcttcaagaaccaagccgatggttttttaggaaagacatagctatacagattgaagtttgatatatatttggtatattaacttaagaaaagccgccctgttggcggcttttttatcctgaatcctgtaatgtgaaaatgttaaaaagcaacggaatagttgttgtcttgcagaatgcgaagaagctgttggagctttcacaaagtatgtgggtgaagctgcagataagtgtgtaagattcccctctccccataatgcgcccgcactttttagaattaatactattctgcttcaatttatcttcaattgttggtattctggcaacgaaatcttcataacgctgaaattggtcaaacggtatacttaattttccggatacatatataatcaacttgaaagaacattagaaatagtcgaagaaaaatctgcagctgtaaaaataccatctaaatggacattgatggagtatgcgtcaacaatataacaattaaattaaattaattcggttcctctttccctaaggagcctaaaaatcagtcacatcatccatcttcagccttcaaacattatcaagccttgatgaggcaagaaacacggggtatcatagacacacaaaaaagatctcattatccaaagtcagattgagtatttttagttgtataagataaaggaggaaatagattgactttacatcattttattggggcggataaagaacttcctattggtgagtatggcagtaatcctacacttaagcccatttctgaactaaaaataaaaggagatgtcaacaaacgctctcaatttaaaaacaatcgaaagaacagtgaaaattcacttgtaaaggtttatgacacagaagaagatgcatacggaattgatattgttcatttagatcctggatatgaagcagtcagaaacaaattcacacatccttatatatatgaattacaagggtacttacatgccaacaatacacctggccaacgtaaatctattaaatcactttttcttttcattgaaaaacacttgtcaaaaggtgaatcaattgaaatatattcctgcttagatggatatgaagatgaagataaagatgaaagcatgggtgtagttatcaatttaaatactttacaatttggaaaacatataaagtttaaagatataaatcaccttagtcatatattctatttggaagataaacaatatgtattagtcaagaaataaacaagaaaaatcccaattgagtaatgttggtttaataagtaaggaaaccattctatacggtttccttacttatatatattattcactaaaatcattcaatttttttataaaaaattgaatgattttaatcccatctttcaaaatgcacttttaatcctggtatactcaatattctttgtatttctttatcatcttcagtatcgatataactttcttcttcatgagagcatgttaccaaccactcctttccatctttaaaaaaagacaagtcttctggtaaatgtggctgctcccaagaatataaagaatttgcggattctttcagaatgttttttgcgttttcatctgtataatagtaataaacttttgctttttgattgtctcctagaatggtactggcccattctgattgctctttcattacttttaacgaactttcaagtttttttaacagaggatcgaatgattttaaagatcccatatcttttcttaaaactaaatgaaattcgtcgcaaatctcgaaagccaaatcaattaactctgaatacagctgatcctttgggttgtgatcaataattaacatagttacctccttctcctattataatttcctatcttttaattactttaaagttaggtgtttataaattaatctaaattatcttgctgccccatagaaagcatgagctttcatacggacaccttttccatgtttatacctagagatcgagtgataatgataatgtttacctttaccctttttatctatctccggaccaacaatttttttaatcggacttgcggctttagcaatagatttggcattgttcttcgacgtagaccaagtgtcatcaccccttttaaggcgtgcaattgcagcaggtcttttcaaaccattaccgataaataatcctttagactttcttactgccatataatgagaataggttcttttacgcttcttaaactcagaataggcaacataagtcactcctgaaatagtcacagctaatccaattgaaattaaatgcgctaaaagtgcctctccaataactattcctataggtataaaccaaacaaaagaagctgttacctcatctgaattaatctcatactttttatttgtttccgtatcagtaaaagttgcttctatcttctcatttgtagcattttcaatatcaactttatattctttacctttttctccagtcttctgagaagtttcatcggttattaatgaaagtttcatattttctttatctaaagtcattaaacctttaactccgcctttttctgctgtgattactaatttctcttcatcatttgttacaatttggtaatacctattgtttatagcctcagcttttgattcattatgtaaaataaaagtaaaagttaatattagacttaaaaaaacagcaatactctttttaaaacatttcattgaaattagcccctttacttaaaagataaaaatccttttccataaatttcatctctccctttctttccaagatcgatggacaatttggacaatacacggttaacttgattataaatatcctcttttgaatcaattccgaatttatctctattttgtaaaattaatgatattactccggtaacatgtgcagctgctaaagatgtaccactttcagttttatatccattattgagggatagtatcggtatatctacaccaggtgcagaaaagtcaatctttcctttaggtgaaaagttagctagtttattatttctatctacagcattaatagagagaactttttcataagctgctggataatcaacatccccgccataattgttacctgcggctgcaacgattatgatcccactgtttactgctttatcaattgcacctcttaacaacggtttatctttggttaatccaaaactcaaatttattacctgaatattattatcaatacaccactctatacctttaacaagggtatctagcgaaccttttccttctgaatttagtactttaactgaatatatctcagtgtctggagcaattccaactaatccaaagctattatctttagctgctataatgcctgcaatagcagttccatgccccacatcatcatctgaggttaaagtcatgtttattggattaaattcccctttaattttcccttttaaatctttatgctctttatcaataccactgtctaatatagcaactttcactttctgtttctctcttaaagtccatattgaagcagcattgatttttttcactccccatggtacttcttgtacacggttatgattaattttttctgtttcatttctctctatatgcttaaaaatgaataaaaagcacgcaaaaaaacctaatgtaaaaattaatataaataataaaatatgaggttttttaattgctaacaccactttttgaagatttgtaaatattctcatccttggccaagaataacaaacctattatatcaatctgcaattaaaaatcaaagtttttcaggaaatatttcattaataaattacggttataaagtagtgtaattcttagttcttagtcatcataaaattgaccttcaaatgcatatttaaaacaaatctcaataaagaccggtatattaacttaaataattttgaagacttctgctagtgacggttttaaagataatctctctcttacagctctttgaatatcaagttctcctaagtattttttaaccagcaccccaaccgtagtcagcgaacaatccgcgtgtcattggtgtcatgtctctttctattaaagtaattatgataaatttatctgcttgccaattccttaatcatcaaacccaattcataaattcccttttgaaggtcttcaagagatgcataagcatatgataagcgaatataactccctttttcctcagcatagatcctgccgagattgagcagaatcccttttgataaggctttggtataaagtaatttcacggatatggaaggcaatatttttacccagacaaagaatcctccctttgggatattccatgtcgccacatctttcaaatgagtttctaaaacactcaaggccaattctcttctcacctttaattgacttctcacctgttctagatgctgctggtattcaccggatataaaccactctgccgctactctctgggataacgaactggagccgtaatctgtttgcatttttatgtcggataaacgttcaatcactggttccggcccgacaatccagccaatcctcaagcccggacttaatgttttcgataaactgcctatgtaaagcacatgcccatttttatctattgttttaataggatccgggggaatctcatctatccataactcacgataaatgtcatcttcaataatgggaagctgtgtattctcacttgccgcaaggatttcttctcgtctcttttttgacattaaaatacctgtcggattatgaaaacaaggatttgtatataagatagccctccccgttctccccttgccatgcggatatgttccggcaaaagtccatcatgatccataggaactccagtcagcttcataccggctgattgaaatacgtgtaatgaataaagataggaaggctgatcaagataaacggtcgatcccctttgtaaaagccccattgatataagctgtaaggcttgcagtgcgcccgaaacaataagaatggaagaaggagaagcttgaatgccgattgttcttaaatagccgcttaatgcctctctcaaaggcaaatatccttttggttcctcatatccgaatgcctctatgttttgggatacctttcccatgatctctttcataacagctaaaggaaaaatctcatgtgaaagttctcctttactgagctgtataagatcagaatttgattctgatttattgatctcttgaacgattttttggcttggctgctgaattccggaggttacatactgatcccaatcgggagcggaattcttagccaaaagtgtccatgtattgttcgtaacaactgtccctttgcccattctgccttcgattaatccatccgccgtcaattcctctaaagctgtaatgactgtgctcctgttcacctcaaagtgtttggcaagcgtgcgctggcttggaatcttacttccgatcggccattctccatttcctattttctcttttataaattgaatgatttgtatgtacttaggaagctttctcatctttttttcttctggagcgctcattaaaagggtcctccttaaagtggttgggtcaaaatctatttaactggttgaagtcatctcatcaaatctttattaatatagaaaaacattaaataactggttggtttttgtaaagaggagtgagaaagatgagaaagaaaacagttcgaatcggcatagcttacagtctgatgattgggttgtgggcatcagctttcccgggaattcgcgcgagtttggagagttacacgccggaacacctcgctttgtttcgcttgttgattgggtcaatggcattggtggtttttgctgttttgactcatatgcgtttgcctgacatgaaggatatccctgctattttatcgttaggatttttaggttttgcactatatcacattttgctgaatatcggagaaaaaaacgtcagcgcaggggtagcaagcttactcgtgaccatgacacctattttttctgcaatgttatcccgtctgttttttggtgaacatttcggtttttataaatgggtcggctctatcattagtttattgggtgtatcgatcatttcatttggggcaggaaactatacaaattcagtgaacggcattttgttaatcttgctggcagctttttcggagagtatttatttcgtttttcaagcccgctatataaaaaaatatggatttatcccattcgttacattcactatttggggcgggacattgccaatgctggtatttcttccggggttatggggagaagttgttcacgcatcgatgaattccacatggtctgtcgtttacttaggcttattaccaacggttgtgccttactttgcacttgcgtatgtcacttcactcgtcggtgcttcagaagcagccatttcactttatttaacaccagccgtagccttggctatttcttgggtgtggttaggtgaagtacctgcgtttattgcactgacaggcgggatggttacagtcgccggggtgtgtttcacctatctaacagtaaataaaaagataaagattttaaatccttatttcttatctaaaaagcaataaagcagatgacatttaaccctgaaaatagagtcataagcagttctcctttttaatacttgggtttcgaaggcttcttctccccaagggtgccagtttacggggttgtgggcgttacctttgttcaagaaaacttgttgcaagcaaattcccccactcccgtaaagaattttgaaaatttacatggcagattgaacatttattgacaaagttaaaatgtaaaaaggtacaaagtgtctattgattaaattattcttttcgtttttattgcgattattgtatgtcttttgtttcttgacaggtttttcattttcacaaataaaaaaacacgctggaaagatgctctaacgtgtcatgatttacttcaaatgagatattgttcaacccattttcttgcaatgttttaatgttgtttactaaatcgggtaattcagcaactgctgattctaatgatgccactccaattacatttattttccttggatttggtgcgtcgagatctaaagggacgtcttcattggcaggtattaatccgggttcataagcaaaagaaagactttgagcaattatcctcttcactccaatttcatgacacgcatcaacagtatttcgcgcacctataattctgattctcgctttttcttcaagattgtaacctgttaaagaggtaaactgatggacaacaacctcaggttaaattttcctaaaagcattaagaacagcatctcgatccattgcatctgcttttacaggagttacccctattcttttgaggaacgtgttcgaccggttacctcgggtcaatgcaaatacttgatggccgttttgtattaatttaggaagaagggaccgaccaattactgcagtccccccagcaacaatgatcttcatgctataccttatttacctgccaatcttgaagcagcttcttcaacttctttatttgctttttgtaaaacatcctccggactcagtaaagctgttccttgcactcggataatttgataatcctcaataccgaggaaattgaacattgatttcagatatttatttgagtattcaacttcttcataccagtcatcatttgtataaattgatccgctagcttgtatgacaagcattcttcgtccatctttaagcagacctactgacccagtgtcagtatatctaaatgtttcacgtgcgatcataatattgtccatatagtcttttaattttgatggaatattgaaattatgcaaaggcaaaacaatgacatacgtttttgcacttttgaattgtttcaatacttctgtcatgcgtcctgttactttttgttcatcgcttgtcagttcttcgcatttttctgccttatcccatgcacttaaaactgttttatcaatcataggcacatcatcactatataagttaatttgctcaagctcttcactctctggaattaattctttgtaagcctctaaaaagtggttcattacccgtagactgtatgatgacgtatcatctacttttggatgtgcgttaatgataagtgttttgctcatttgaaactctcctttcattttatattaaagactatattaatcgacgattaacttggtcactaatataaaccttgtattttattttgtcaaacggaacaaatagtatctgaagaagggttttaagattgactatcatcaaaaatactcctaagatacaatgtgataaaccttaaaatcaaaagcaggtgagtttatatgcagtacagtgttggggttgaatatgctttacattgtctggtttatttaatagatgttccctccaaggaaagtgtcgggattcgggaccttgcagagttccaaggactttcagaaacatttctttcaaaagttttcggtaaattatctaaagctggtattgtaaattctgtccctggtgtaaagggaggatataggttagcaaaatccccggaggatatttccttttgggatgtaatagaggctgttgaaggaccaaaacccattttccaatgtaaaaatattgtaagcaatggtctactttatcgagacaaatgcaactcttgtgaatccagcaattcttcttgtacaattaacttggtaatgcttgaagcagaagaacagatgcgtaattatcttcgtaataaaacgctcgcatggttaaataaagaattggacgtagtattgcctaaaaaaacaaggacagatactcgggaatacttcataaaaaaaagctctgactaaattaattagtcagagcttttttgtgcttcaagatgccttcggagaatttttacgaaagtatggacgagacaacaaaatgaataaaactacagattaagtttaaccctccgattcggagagtcaaaggttaatgttcgcctttttgttctactttatgaaagggtcagcaattgctgatattataataattaatcaactctttgtggaatggatgataacaaatgacattaggccaaagattaaaatgggctcgaaaaaaatccggttactctaatcaagacgtgccagcagagaaaattggattaacagggtagacattgtctaattacgaaagggattatagatcgcccgatccggagacattaaagaaactcgctgatttatatgatgtatccactgattttttggtcggtagagaagaaaaggacagacccaaatctaaattggatcaaacagtcaatgaagcaattgaacaacttaaaaacgaagagactttacttttcatgaaagatgatgacattcaaatattatatgactataaataaaaaagtgaggttttatagacttcactatcaaacagttcactactcaattattttttcattgtttgttgttgcgcttgcgttttcaacactatgtgcttcaccatgaccaggtccaaaaagatttaatattacaactcctacaagtatcaaaacaatcccagtaacactggcaatgttaattttttctttccaaatcaaaatcgaaattattgtagtagcaatagtccctacaccagaccaaactgcataggcggtattcaaaggtatggacttcattgcaagtgataagaagaaaaaggaacctataaaagcaataattgcaccaatagtagggtaaagtttcgtgaagccttctgcggccttgagcatagaggaaccaataagttcaccaaaaattgcgagcaataaatataaatatgccattgttaattctctcctcctgtataaataatcaacgtcttataaatttgtactaaacctctatcgtttgtttcattatttctttattagttaccactttacaagaaacagcaaatgtttataagtctttattttgcaaaaaaattgtgcgcaaaatgactggtgttccttagacgagtagataaaatctaatctagttaatctaataaggtataaactaaactccattatggtaaagtaaaaatagcaaccaatttaaaagtgaaagaaggtgatccaatgccaaataacagtacacccaatagattaatcgctgagaaatctccatatttacttcaacacgcccacaaccccgtaaactggcacccttggggagaagaagccttcgaaaaagcaaaacgcgaaaacaagccggttcttgtcagcatcggctattcgacttgtcattggtgccatgtaatggctcacgagtcctttgaggacgaagagatcgccggtatgttaaacgataaattcatagccatcaaggttgatcgtgaagagcggcctgatgtggattccgtgtatatgagaatctgccagctgatgacggggcagggcgggtggccgctgaacgtgttcgtcacaccagatcagaagccgttttatgcggggacgtattttccgaagacgagcaaatttaaccgtccgggctttattgatgtgcttgaacatctgtccgaaacgtttgcgaatgaccggcagcatgtcgaggatatcgccgaaaacgccgccgctcatcttgaagtcaagattcacccggctgagggcatgcttggcgaacaggcggttcatgacacgtatcgccagctggccggcgggtttgacacggtgtacggcgggttcggccaggctccgaaatttccgatgccgcatatgctcatgtttctgcttcgctactacagctatacgggcaaggaacaggctttggccggcgtaaccaagacactcgacggcatggcgaacggcggaatttttgatcacatcgggttcggattcgcccgctactcgactgataatgaatggctcgtgccgcattttgagaaaatgctgtatgacaacgcccttctcctgaccgcctatacggaagcctatcaagtcacgggtaatgagcgctacaaacagattgcgatgcagatcgtaacgtttattcagcgggaaatgatgcatgaagacggcagctttttctcagctttagatgctgataccgaaggccgtgaggggaaatattacatatggtccaaaaaagaaatcatgaatcttctcggtgatgaactcggcccgctttattgcaaggtgtataacatcacagatcaaggcaattttgaaggcgaaaacatcccgcacctcattttcacgcggcgtgaggccatcctcgaagagaccggcctcaccggacatgagctggccgaacgccttgaagaggcaagaacaaaattgctggaagcgcgtgaaaacagaagctatccgcatacagatgacaaagtgctgacctcatggaacgcgctcatgattgccgggctggcaaaagccgcaaaggtatttcacgagcctgactttctcagcatggcggaaacagcgatccgctttctcgaacgtcacctcatgccggacgggcgcgtcatggtccgataccgcgagggcgaagtgaaaaacaaagggtttatcgatgattacgcttttctcatctgggcttaccttgaattgtatgaagcgggttttcatccgtcttatctgcagaaagcgaaaacgttatgtacaagcatgctggagctgttctgggatgaacggcacggaggttttttctttacggggaatgatgccgagactcttcttgtcagggaaaaagaggtttatgacggagccgtgccttccggaaacagcgcggctgccgtacagttgcttcgtctcggccgcctgacgggtgatgtatcactgattgaaaaagccgaagcgatgttttccgtgttcaaacgggaaatagaggcctatccgagcagcagcgctttcttcatgcaaagcgtactggcacacacaatgccccaaaaagaaatcgttgtgttcggaaggaaagatgacccggacagaaaacgtttcattgaggcgcttcaggagcatttcactcccgcctatacgattctcgccgcagaacatccggatgagcttgccggcatttctgactttgccgcgggttatcaaatgatcgatgggaagacaacggtctacatttgtgagaatttcgcctgccggaggccgacgacggatattgatgaagcgatgaacaccttacaaatcagcagcagagcctaggcggcctgctgcttttcttttttcacaaaacggaatgcgagccatgcgaagatgatgttgatcaccagagtcgatatgcaatcgtatatttcatagccgccggctgctgttgtaaatatcgacggaatgccgccgtataccgaatgatcctctgtgagaaagataaataaaaacatattattggcagcgtgaccgccaagggacatctccagactgcccgttttaatcgtgataaaggtccagatcatgccgatggtaacatatccgattcccgcccagagagctccattttccatctccggatttccgaaatgaagtgcgccgaataatccgccgataatgaccgtcagaaccaccgcgtttgccgtcaattttccggcaaactgaagcagaaaaccgcgaaagagaaattcctccgcagaggtttgaatcggcaccaacaagacggccgccgctaacagcagcagaaaacgtgaagcatggaattcctgaagcgtgaaacgatccggatgaattaaaaaatcaatcagccccgcgacaaacatcagcacaacatatgtgccgaatccaaagaaaattctcttccagttcagcgactgattcggtgtaatgatggataaaaaccgccgcttcataatgaaacgaaccgctatccaaatgcccggaatcgctatgaaatagacgatatgctgtaaataaatatccgccagcgggtcacttaatgccgcctcatcccaatttatcgtcagtgaaggattgaaagcggacgtgagaaacatataaaacacggtcagtatgcttccgaaaaagaacaaacccacaatgagcaacagagaaagaagatatctcgatacactatttcttccctctgcgggccgtacaaatgtattcatatttatgcatcaacttcctttccttcaacattttacaatataaacagaaacagatataggaaatgttatatattttaagaagaaagcgctatgccgtttcctttggctctggttatttacactctgtttttgccaaaaaaagacctttataatgtattcgtcagataaatttacagtattttctgattacaattgctaagtcagggggttttttatgaaacatcagacattctcaaatgtagcgaaccgattagaccgtctccccatttcgcgtgtgcactatcaagtattaaccgctctcggaatcatctattttttcgatctcgctgatctgtttacgctcagcaacgtggctccggcgctgattgagcattggggcgtgaagctgtccgtcattgccgacgtcacagccgcatccttcctgggcatgtttttaggcgcctccatcggcggaagactgtccgatcggatcggcaggaaaaaagcgctgaattgttttgtccttgtcttttcgatctcatcttttctgaatgcgctggcatgggacattccgtccttaatgattttccgcttcttgaccgggctcggcgtcgcggccgccatgattgtgacgaacagctatttggcggaattttttccatcatccgtacgaggaaaatacatctccttttgcgccatgatcggactgatcggcgttcccgtcacaaacgttgtttccgcttttgtcattcctttaggctcatgggggtggcggctcgtattcgtatggggggcggccggtctcatttatttcttttttatccgccggcttgaggaatcgccgcgctggcacgaaaatcggggcgcatatgatcaggcaaacgccattatgaaccgtcttgaagcacgtatagagaaagaaaaaggcccgcttcccgcgccaaaagaggcggcagaagtacatacagtgaagcacgcaggctacttagggctgtttcagggcaggaatttaaagatcaccatcatcctgtcagcggtatggattcttgaaacctttggcttttacggctttgcttcatgggtgcccagcctgctgaaaagcaacggcatcaccatggaaaaaacgctgtggtacaatgtgcttcactctgtcggcgcaccgcttggcgcattgctcggttccatgatatccgagacgttccaaagaaaatggattctggccgcaagcgcttttctgactgccattgccggactgttatacggcatgacgtttattcccgtcatgattattgtgtttggatttgtcgtcaatgtcacggaacgggttttcacctcaaacttatacgcatatacatcggagccgtatcctacggaatatcgctcggccgggagcgggctggcatacgggctcggccgtttttccaatatattcggatccctgctcgtcggatttattgccgttaagctcggctacatcagcgtctttttgttcatcggcggctgctggcttctatgttccgttttgttaattctattcggtccgaaaactaatgctcagcaaatttaatcaataaaacagtgcgggttccccgcactgttacactgtgatttctatcaaattgccttccccatcctctatcacgctctcataatatccgtcacccgtcacgcgcgggccgcttacaacctgaaatccgtcatttttaaacgtctccgtcaattcattcacccgctccttgctgcctgtagaaaatgcgagatgcgcccatccggtcatattctgtgacggagcttcatcaatgccgccttttttcataagttccagcctgcatccggagtcaaacgaaagaaaatacgatttgaaatcttttttctcattatgataaaggtcattggccttggcgccgaagtatttctcataaaattctttcatccgttctaaatctttcacccatatggccgcatgttcaattcgcatatgtccgcctcctttttttttctcaatctagttataaagcatgaaacccatttcagctcaagactttttccgctgaaattgatgcataatttgttttttagccgtttctccgtgcaaaaacagcaaaaatgcttcccttccgacccgttccaaatgaagttccagagatgggatattcaatgcccggctgacgctcaggtttccctcgccgatgatctccgcgtcccatttctgttctttcgcaaactggtacaagccggcagccacatcatcactgtgcgcatagatggccgtcggcgccttgtggaaaccccagaagtgttcacctgcccgctttccgtcgtccatatcatggcatccgatcagaatgcgggtttcatcaagagagccgaaaaccgccttatatgcggttaccttgtcggccgtactcgggcttttttccgcttcccgcacacatgtaaaagcaacatcttgatgcccgcggtttttcaaatacaaaaagctttctctgtaagctgcctgcctgtcattataagcgcagggaatctcttgatgctgcgtatattcacaagcgacaatgggaccgtactccagataaggcacagcggtttcccattcattcgcgcgggacgtgacaatcagtccgtcaatctttttcattttcagcagttcgaaataggtcatctctatagcggggtcatagttggtggggagaagggttgtcacgtaatcatgggcaaacgcttccttcgtgataccgtttacaattttgtcaaagcagggatggtcgctgtacggcaaaatcacgccgattgtattggtctttcctcgaatcagatcaatggcggttcgattaggggtataatccatctccttcatcacttgattcacaagacgccttttctcctcagatacgtacgggtgtcggtttaatacgcgtgatacggtagccaccgacacattcgccagtttcgcaatctcttttatatttgccatgtgctcctccatttttggtgataaaaaagcagcaagagtggatttctcttactgctatctcatcataaatccactgtcatttcaacagggcaatggtcagaacccatgatatcggcgcaaatggccgcttcgctgatccgcggcttcagtctgtctgaaacaatgacgtaatcaagccgccagccgatgtttttctcacgtgcgttcgtcctgtaagaccaccaggaataggcgccttcccgatcaggatataaatagcggaatgagtcggtaaatccggtgttcagcagggcgctgaacgcttcccgctcctgatccgagaaaccggcgttcttccggttggctttcggattttttaaatctatctccctgtgtgcgacattcagatcgccgcataatatcacgggcttcttccggtcaagcttctgcagatactccttaaaatcggcttcccattgaagacggtaatcaattcgctctaatccgcgtttggcattcggcgtataacagttgacgacgaacaggttctcaaattcaagtgtgatcacccgtccttcttgatcatgatcgtcaattcccagtccataaaacacgtgaagcggcttttctttcgaaaaaacagccgtgcctgagtagccttttttcaccgcgtagttccaatagtcatgatacccttcaagctgtaatgatacttgtccgtcctgtactttcgtttcttgcagacataaaatatcggctttcgtttcctgaacgtaagtattgatatctatctttttcatcacggcacgtaagccgtttacattccaagaaatcagtttcatgtgttccccctgtccggctcagccggcattccagtgtttcaatgtttccgccctctaatgccagcatctgctttttcatttctaaaccgcctctgaatccggtcagttttccgttttttccgatgacgcgatggcacggaaccgtaatcaataccggatttttcccgattgcggcgcccacggctcttacggctgccggtttctgaatcatttctgctatatccgaataggagtatgtctcgccgtacggtatgtccataagcgctttccatacagcaagctgaaattctgtcccgtaaagatccaccggcactgaaaaagctgatctgccattttcgatgtactcggacagctctgccgtgtaagacgccagcttctcatcatcacgtgccaatcggtattgcggcagtgatttttttgcccactgctcaagctcttcaaagcttccatgatttgaacctataaagcaaagccctttagatgtggcggctgtatacaggctccaatcattccgtgtgaaaagtgtccaatagaccattgtctctttactcatattgaacctccctgtcccattccggcagtttttcggtattctgtgggcgaattcccggttctctttttaaaaagagtggcaaaatgcgctgtgtttggaattccgaccgtcagagcaatctccatgactgtcatatcagtatgctttaaaaggtgttccgccttcgccaatcttatgttctgtatatactcaatcggggatattcccctgatttttttaaatgtccgctgtaaatgataagggctgccgtgacacatttcggccagtacactcagagtcagagattcgtgataatggcggtcaatgtactcaatgatttgagcaatccattcttcatcaggaagacgaagaccgttcggccggcaccttttacagggacgaaaatgtttatcaagcgctgcatcagccgtatcaaacaccagcacgttttctttattcggagctctcgatttacaagaaggccggcagaaaatccccgtcgtctttactgcataataaaatgccccgtcataagaagcatcattgcgtatgattgcgctccacttttcatcagtcaggatatttctgtctgtctccatctcagccaccccctgttcttcagtataaacaaattcattgcataagtacgcgtatttgaatagaggagcaagataacaaagatagatgtcaggagcacttccatgtttcatgtgaaacatttcggcaggatggaggaggactgatataaaaaaagagcaggagcccgcaggctcttgctcttttctttcggcttactcgccagttacgtatggaagtaaagccatttgacgtgcgcgtttgatcgcgatagtcaatttacgttggtatttcgcgtttgttccagttacacggcgaggtaagattttaccacgctcagaaacaaactttctaagaagatctacatctttgtaatcgatgtgcgtaatgccgttagaagtgaagtaacaaaccttacggcgtttcgcacgaccgcctctgcgtcctcctgccattgtcatttcccacctttctcgttatgaatatagcgataatctattagaacggaagatcatcatccgagatgtcaatcggcttgccgtcgttggcaaatggatcatcattaaagctgttcccttgatttcgtctctggttgttctgatttccgccgaacggattatcattttggcctccgccaaagtattggcctccgccgctgtttccttcgttgtatccgcctgatccagaaccgccgctgtttttaggctcaagaaattgaacactttcagcttggacttctgtcacgaagacacgctgtccctgctgattttcataatttcttgtctggagtcggccgtctacgccggcaaggcttccttttttaagaaagtttgcaacgttttcggcttgtcttctccaagtgacacaattaatgaaatcggcttcacgttctccggactggttcgtgaatgtacgattcacagcaagagtaaacgtggcgacagccgcaccgcttggcgtataacgaagctctgggtcttttgtcagtcttccgactaatacaactcggttaagcatatgaaagaccaccttttaacattatatatttcaaattgcttattcttcttctttaacaacgatgtggcgaatgatatcgtcactgatcttagctaaacggtcgaattcagcaaccgctgcagcttcagactgaacgtttaagatttggtagaaaccgtcacggaaatcgttgatttcgtaagcaagacgacgtttaccccaatcttttgttccagtgatctccgctccgttagaagtcaatacgttgttgaaacgctcgataactgccttctttgactcttcgtcaatgttcggacggataatgtacataacttcgtactttttcatctgtttgcacctccttttggtctaagcggccctataatgggcaaggagcaataattctattactcacaagtttatattataccaaagctcttgtccctttacaactgtgtcctatacattaaatcggaaatgaatgacatctccgtcttggactacatattccttaccttccagacgcacttttccggcttctttcgctccggacattccgccgcctgccaaaaggtcttcataagcaaccgtttcagcgcggataaagccgcgttcaaagtcagtgtggatgatacccgcacactcaggagctttcatgccttttctgaatgtccatgcgcgcacttcctgttcgcccgccgtaaagtatgtcgcaaggccgagaagagagtatgacgctttaatcagctgatcaagacctgattcttcgatgccgagctcctcaaggaacatttgcttttcttcgccttccaattcagcaatttcagactcaattttcgcacagacgacgataacttcggcattttcacccgcggcgtactcacggattttcgcaacgtattcattgtctgaaggatcagccacttcatcttcgcttacattcgccacataaagcacgggttttgacgtaagcaaatgaagctgcttcacaagcttttgctgttcttccgtaaattcaacggaacgggcaggcttttcttgttcgaaagcttctttcaatttagacagaatgtcaaattcaaaaaccgcttctttgtctttttgcttcgcaagcttgcttacacgcgtgatgcgtttttcgactgtctccatgtcggcaagaatcaattcaagattgatcgtttcaatatcgtcaatcggatcgactttccctgacacgtgcgtaatattgtcatcagcgaatgcacgtacaacgtggcagatcgcatcaacctgacggatatgagaaagaaacttatttccgagtccttcacctttagatgcgccttttacgatccccgcgatatcagtgaattcaaacgcagtcggcactgtttttttcgggttcaccaattcagtcagcttttgcagacgttcatccggcacttccacgattcccacgttcggatcaattgtacagaacgggtagttggctgattcggcaccagcctgggtaattgcattaaataacgtcgattttccgacattcggcaaaccgacaattccagcagttaaagccattctttcatctcctctatatcaaaccatcatcgtataaacgtattgtaaacctagagcaattataaggaggttcataggaaaagacaagctgagaaaaaagcatttcccgccctctctctccttagattacccttttttaaccgctaccagacagtcaaaaagcgtacttcccattccattatcggaatttgaatcctttgtgagcatgttgacggagcctccgaatgccgcccacatgccttcatctatattcaccgtcttcgggtgagcctgcttcatgattttcaccctgccgcgcagacggccgcggtcattgtatacctctgccgtatctccgtcttgaagtgaaagctcctcggcgatatccggcgacaggtccacctgaatctgctggagcttttcaataaacggcacgtgctgtgaatgattggagcgctgcgggtgaatggacagcagcgtatacggatatttcccggccagtccggcgtcgtgataaacggactcctccggcacttccaattgagggaggccgctgtatcctttctcttctgccagtgacgagacgaattcaaattttccgctcggggttaaaaattgaaaatcactccacggaacctgtttaaccggaagcggcatatgtcctttttcctttaattgctcaagggtgattccttctttctccaaagaagagagccccatttttaagaaatcttccgcactgtaatcaaacagctccccgaatccgagacgctttgcgagttccgtccagatccagcggtctgattttgcctctccctgcggttccgcaagcttcttaccatattgaacatagtgatgatacatgctggaataataaatatcttcctcttcgaaaacaacggccgtcggcagcacatagtcacagagcttcgccgtatcggtcatgaccgaatcaatggccactgtgaccggcgttttttcaaacgcttccttcactttttttgtattcggcacctgtgtcagcggattgccgcacgtcacgatgatcatctcaatcggcgggtcggctgcattcagcgcctcttcagcttgagtcatcatcgaaaacgttctcgaacttttcttcaaatcaggacgagtgagctcggcctttgcaaagctttcaccgacttgcacatttccgaagttggcgccgccgcctttgataccgacatttccgctcgccgcagctaaagcgtcaatccaccgtatcgtcccgcccccgtttttatatctctgcatcccaagacccataaaagtggaggcgggaccgtcagcatataaatcggcaagatattcaagcgcttctaaagacgtttctgttttctcaatgatctcctcaaaagaaatcgtctgcagaagcttgtctatttcctcaaaaccgaccgaatgcttttgaataaaatcagaatcggttctgccggtttggcataatatttttaaaacacccgccgcaagccagccatccatgccgggtttgacggatatataccggtcggcaagctttgcagtcgggttaaaaatagggtcaatgaccgtcagtgtcgctccttttttcttcacctgctgcagatgatgatagaggtgcatattcgtccgggacacgtttctgccccatacgatcacatgcttgctgtgataaatatcaagcggtccatgcccgtaagaacgcccgaaatcccagcgctgcgcttcaatgccggaaccccagcaaatgctgcccgcaatctcggttacaccgccgtatccattgaaaaaacgctggtcgagcgccttcaaaagaccgttattggcgtagtcatgactgtgcagcactgcggcagtgcccaacgtctccttaatcaccgtcattttttcagcaatttcatctaacgcctgctcccaggaaatgcggacaaattcgccgtctttcttttttaaaggaaaacgaagccgttccggcgcattcgttttcgtctccagcattctgccccggccgcaaattttcccttccgtaatgggatgattcgggtctccgtctactttcgtcacctttccatcctcaactgtcaccaaaaagccgcagctgtcccagcaattcagcgggcacgctgactgatgcactttgctcatcgggcctcttcctctcctctatatgaaaaagcatgagcgccagcccttatgatgtaggctcctcatgcttgacgagtacttttttcagctttctctcaaaatctcttctcggaatcatgacactgtgggaacaacccgtgcatttgatccgaatatccattcccatccgaatgattttccacctgttttcaccgcaaggatgcggtttcttcatttcaacaatatcattcaggccaaagtctttatccgccaagacccttcacctctctccatagactgctttatttattgtacaaaaaaagacaggataagagcaacggccgcactcaaaatgagcattatacttttttccatctccctaaaatagggtaaagaagaagacataccagcaaataaagacttaaaagcccgtaaatgggatataaaatggcgatcaaatctgaaaaaccgattgtcgtaaaaggcaccatcacagctaaaagaagagatacgagcgtccatctcggcaatttcacaaatgcaagcatgcggctggacagcccgaaaagaccggtcaccgttgtcgtatagatggctaaaaaaagcacggcggccatacaaagaaataacggataaggagcgccttcaaggacggcgaaaagaggaatctcatattgtgtaagactgcctgaaagctgtacaagcgtttcattgtaaacaaatgaaatcataccgaaaatcagcccgcttgcaacgcttgcgattttggcttctcccagtcccttcatatctttcccgattgaagaaagaacagcgacaacagaaagaatgtttaaggacgtgaaggtaatgcttgccggccaattatactggcgggtcaagtctatcgtccacgtgtaatgatgcgttgtctgaaaaaagaccaatgcatataacagccccgctacaagaatcggtatcaaaatactattcagagataatatcccttttatatcccaaaagaataaacccacggtcacaatgcaaagaagaaaaataccgatccaaaacggcagcttgtacatttgcagcgtcacaccgccgccggcaatcataaccatcgtcattgaaaacaaataaaacataataagcacatcatagactttagcaagagccggtcccatcagatgctcaagcacaggtaaaaagtgcgttgattgaacccgatagctgatcttcaacacaatataagccgaaatcgtaaacatgactgtaaacaatacaatagccagtccgctttcgacaccgaaaaactgccatatttcctgcccgcttgcatacccggccccaatctggctgcttaatatgagcagcatccacttcatcccggctctccacaccctcatcacctcataaaatttctgatcatctccgcatattgctactatattgagtgacagcagcaaacattcatacaaatgggacaaatatggtatgataacgacgattgactattcagaaaatttatttatgttaggcgctcaaatcatggacatcaggcgtttaaccgcaagtgatacccagccttactccgattcaggctcaaagctttaaaagatcacccggacgcaatcgccgtcagctatgaggccgtccgaaaaatgcaaagccaggcttgaagccggcaatgccatcttgcttggcgcctttgaacaagacagcctgataggaatcctcaagatctccaagcatctgctgtttaaactaagacacattgcggttatcggttctatgtatatttcccccaaacacctagggtcaggcgcgggaaaagctttaatgacggaagccatcagccgggcaaaaaagatgaaagacacagaacagctccatctctctgttacttcaacaaatggaacccgcaaaaaaactctgcgctcagttaggattatcctcttctctgcagaaaaaagagcgctggaattagatcatcagcaatatgttgatgtagatcatatggtcttatttctttcatgaacttagagaataactgctctgagttcttttttctatccgctcttttcaaacaaccggcatgctcatcatgacataagcataaaaaaaggcagcgctggatatactgtaaacaaccatacatcaccaaaaacaacaatgtaatactcgtatgacatgacaaggaagtgaaccttatgaatcgaaaaggcgggcttttttctcaagaacgggcaaaacaatatgtatcccatacggattcttctgctgcgaatcaaatacaagcaatccttacttcatctttacgtaaagcagccggcagaccgttagtcaccgtgtgtatcggtacagatcggtcgaccggagattcattaggtccgctcgtaggaacaaagttagaaaaaatgaatttaggcagattgcacgtttacggcacgctgtcagatcctgttcacgccgtcaatatgaaagacaagctgaaagatattcaacatctacataaaaatccgtttattatagcggttgatgcttgtttaggccgcgtcaaaagcgtaggctcatttcaaatcggcgatgggccgctgaagcccggagcaggtgttcaaaaagaccttcctgaaatcggtgacgtccatatcaatggaatcgtcaatgtcagcgggtttatggagtattttgtcctgcagaatacgaggcttcatcttgttatgagcatggcaaatgttttagcagaggggttacagctgacagataaatcagaaggccggcaggaacggctcagtccgtttcataagctgacaagacgtatataaaaaaccatcttttttaaaaaagatggtttttacgcttctctttcggacaatagttccaggatacgttcaagatcttcatttgagaaaaactcaatctcaatcttcccttttttcttttgtctcttaatattgactgttgttccgaagtaattttgcaaatacgattcccgctcttttaacacaacatcttgaacaggttcttttttctttgtttcacgtggaacattgttgtttaactgctgaatcagctgctcaagctggcggacgttcagctgttcttcaaccactttcttcacaagcggttcaagcttgtttttatttttcaagccaagcaaggttctgccgtgtcccatggataacgtaccttctgcaatgaggttctggatgctttccggcagcgtcagcagtcttaaatggttggcaatatgaggcctgcttttcccgagccgtttagcgagctgttcctgggttaaatccaaatgcttcagcagtgagtcatatgccagagcttcttcaagcggtgataagtcttcacgctgaaggttttccaaaagagcgatttcccgcatcagcgattcagataaatcccgcacgatagccggcactgtctctttaccggcaagttttgcggcgcggtaacggcgttcgccggctacaatatcatagcccttcaatgattttctcacgataatgggctgaagaatgccatgctgaatgatggattccttcagttcagctaatgactcatcatcaaattgttttcttggctgataaggattggggcgtaaatcactgattttaatttcttccactgtctcttcagacaaatcaacctgattaaacaacgcgttaatcccttttccgagcccgcctttagccattcgctgccacttcctttgctaaatctaaatatacttccgcacctctcgaacgcggatcgtataatatgatcggcttgccgtgactcggcgcctcacttaaacggacattgcgaggaataatggtttgatacactttatctctaaagtatttctttacctcttctatcacttgaatgccgagattcgttctggcatcaagcatcgtcagaagcactccttctatcattaagtcggtatttaaatgtttttgcacaagccgaactgtatttaataattgactcaatccttcaagagcgtagtattcgcactgaaccgggataacgactgaatctgaagcggtaagcgcattaatcgttaataacccgagagacggaggacaatcaataatcatgtaatcgtaattttgtttcacagattctaatgctcttttcagcctgacctcccgtgagatcgtcggaaccaattcgatttccgctcccgcaagctggatcgtggccggaatgacatctaagttctctactgaagtcggtttaataatatctgtaacatctgcatcatctactaaaatgtcgtacacacaatgatccacatcggctttttcaatccctaatccgctcgttgcattgccctgcggatcaatatcaacaagaagaacccttttacctatgtaagccaagcaagcccccagattgacagaagtcgtcgtcttcccgactccgcctttttggttcgtaattgctatgatttttcccacgatgtcacctaccttcacatgaacatgtactgtcttgtttctatcttatcaaaaaaagagtaaagcgttttatttttttcataatttgtttatcagcaagtgaaaaaaatgtaaacgaaaaagacactttctaatataagttctccgataaagtgacttttttgactgtaaaaagacaattcacgacacaaaaagataaaattttacatatataatgtatagtgcacaataaatctatcattatctcaaaatagttttttgattaaaataaaaactcccctgctgatcaggagagtttttatttaggtatccgaatggtaagctggatgtactcttcgaattcttcttcttcagtgttcagcctgacgccgctgtcttccaccatggacagtgactgacgaatcgtattcatcgcaattcttgtatccctgctgaacgctttgcgtctcggctttggtttctgcttattctgttcaagcattttcaccactctgtcttctgtctgcttgacgtttaagcttttctcaatgatttccgcaagcaatgtgacctgaaactccggctgtttgagcggaatcagtgctcttgcatgacgttccgtaatttttttctccataatcgcatcctggacgggttccgggagctttaacaatcggagcttgttcgcaatcgttgactggccttttcctaagcgctgcgccaaggcttcctgtgttaaatcatgaagttctaacagccttgcgtacgcatgagcttcctcaatggaggacaattcttccctttgcaggttttcaatcaaagcgacagatgctgtttccgtatcagaaaaatctttaataattgcgggaatcttctcccattcaagcgtctgtaccgctctccagcgcctttcacccgcaatgagctcatattgtccttcatcttctgtatgtctgacaacaatcggctgaatgatgccgtgtgtatggatagtcattgctaactctttgattttttcatctgagaaaatggtgcgtggctgaaaacggttgggaacgatagcatgtaccggtatttcgagtatctcttctttgtttgtatcatgctcagctatctccggttcctcttccttctcaccaaacccgaagaaacgagagaatgaatgcttcatgtacctacaccacctttaaaaactgccatttttataattctattttctcatggtttttcctgctgtatcttcatcaattttgcagaaaatatgatggaattgtcacatcaggctgtctaaattacccttcaattggcgatttatttggagtacccggttttctcggatattttttcggagtgcttttcgtcttgcgaatgatcataatgttccgttcactttcttcaacgggaagtgtaaaggaatgaacttgttcaagctctcctcccaatactttaatcgccttttgccccgctttcagctcttcatcagcggctgcagcttttaatgccgcaaaaataccgtttttcttggccagcggcagacaaagctcactcaggaccgacagacgcgccaccgcacgggccgtcacgagatcgaagctttcccggacgtctttccgctgtccgaatgtctccgctctgtcatggacaaatgtcgtatgctctaattgtaaagcatcagagagagtttccaaaaacgtaatccgcttattcagtgaatcgacgatggtgacatgcagatgcgggaagcagattttgacgggcaggcttggaaaaccggcgccggcgccgacgtcacaaagagtggtgaccttttcaaaatcaatataaaatgccgccgttatcgaatcataaaaatgcttgagataaacttcctttttctcagtgatggatgtcagattcattttttcgttccattccacgagcatccggtaatacaactcgaattgctccagctggcggtcagaaagggaaatccctttctccgctaaactggatgtaaattgctctatattcatgccgtcatcctttctattcagctaccttggcaatacggccctgctccaggtataccagcaggattgaaatgtctgccggattgacgccggaaatacgggacgcttgagcaactgataaaggacgcacttctttcagcttttgacgcgcttcagtagcaattcctttaatggcgtcataatcaatccgatcagggatttttttgttttccattttcttcagcttttccacttgctgcaaggatttttcgatatatccttcatatttcacctgaatttccacttgttccgccacatcttgcggaaccggagaatctgcaggcgcaagttttgtcactgtttcatagttcatttccggacgtttcattaaatctgtgccgcgcactccgtctttcagctcgcttccgccgagtgaacggatatattcctgattctcaggagacggcttgataataacagaccagagacgttttttctctgcctcgatcgccgcttttttcttctcaaacgcttcatagcgctcatcagaaattaagccgatctcatggccgatttccgtcaggcgaagatccgcgttgtcgtgacggagcagcagtctgtattccgcccgtgaagtcagcagacgatacggttcattggttcctttcgttaccaaatcatcaatcaatacaccgatataagcatcggaacggctgaggatcacttcttcttttccaagcgctttgcggcctgcgttgatccctgccataattccttgcccggctgcttcctcataacctgatgtaccgttaatttgaccggctgtgtacaggttagggatttttttcgtctccagtgtaggccagagctgcgtcggtacaatcgcgtcatactcaatcgcgtatccggctctcatcatctgcaccttttccagtcccggaatggtcgccagcatccgctgctgcacgtcctcaggaagactcgtggatagaccctgaacgtatacttcctgcgtatttctgccttccggctcaaggaaaatctgatggcgcggtttatcattaaaccgaacgactttatcttcaatcgaagggcagtatctcggtcccgttcctttaatcataccggaatacatcggcgaacgatgcaggttgctgtcgatgatctcatgagtctcaggactcgtgtaagtcagccagcaaggcagctgatcggtaatgtattcaaccgtttcatatgagaaagcgcgcggaaccgggtcccccggctggatttctgttttgctgtaatcaatggaatcgcttgagacacgaggaggcgtgcccgttttaaaacggacgagatcaaaaccgagctcctctaagtgctcagaaagtttaatagacggctgctggttattcggaccgcttgagtaagacagatccccgagaatgatccgccctcttaaatacgttccggttgtcagcacgaccgtttttgccttgtattcagcaccggtttgcgtaatgacaccgcggcactctccgtcttcaatgattaaacgctcggcaatcccttgaagaagtgtcaaattcggtgttttttccagcgtatgcttcatttcgtgctgatattggaatttatccgcctgcgcacgcagcgcccgtacggccggaccttttcctgtattcagcattctcatttgaatatgagttttatctatatttctagccatttctccgccgagcgcgtcaatttcgcggacgacaatccctttcgcggggccgccgacagacggattacatggcataaacgcaaccatatcaagattaatcgtcaaaacaagcgttttggctccctggcgcgcggatgcgagggcagcctcaacaccggcatgcccggcgccgatgacaatcacgtcgtattggcctgcttcataccccatggttttttcctcccttttatttacctaaacaaaattgtgaaaagagctgatcaattaagctttcgtgaacggcatcaccgatgatttcgcccagcagttcccagcaccttgtcaaatcaatttgcaccatatcaatcggaacatcctgttcaatcccgttcagcgcatcatcaatcgcttgctttgcctgatgcagaatcgaaatatgacgggtgttgctgacataggtgagatctccgctttcgatcgctcctgtataaaatagcgactgaatcgcttcctctaaatcttgaatgccttcttctttcagcaatgaggtcgtgacgacaggccggcctttcgccagttccttgacgcgctcagcgtcaatcttagcctcaaggtccgtcttattcataatgacaatgacgtccattccctcaaccgcttcaaacaatttcacatcttcttcagaaagcgcttcgctgtggttaagcacaagcaaaatgagatccgcttccttcagaacctgccgtgaccgttccacaccgattctttcgacgatgtcttctgtctcacggattccggcggtatcgacaagccgaagcggcacgcctcgcacgttgacatattcctcaatcacatcacgcgtcgttcccggaatatcggttacgatcgccttcgtttcatggacaaggctgttaagcagagaggatttcccgacgttcggacggccgatgatcacggtagacagtccctcacgcaaaattttcccctgctcagacgtacggagcagcgcctcgatttctttcttcacgccgcttgccttctccactaaaagctgatgcgtcatttcttcgacgtcatcatattccggataatctatatttacctcaacatgggcaagtgtttctaacaactcatcacgcagacggcggacaagcgcggaaagccgtccttccatctggttcatggcgacattcatggcacggtccgttttggctctgatcagatccatcaccgcttccgcctgtgaaaggtcaatccgtccgtttaaaaatgcgcgcttcgtaaactcaccgggttctgccagtctcgcaccttctcttaaagcaagctggagcacctgattaaccgtcacaatacccccgtgacagttgatttcaatgacatcttcccttgtgaatgttctgggcgctcttaaaacagacaccatgacttcctcaataatccgtcccgtcgtactgtccgcgatatgcccgtaatgaatggtatgcgattctgccgaactgagcgttttgcctttcggacccttgtacattttgtcggcgatctttacggcttccgggccgctcagccgaacgatcgcaatcgcgccttcacccatcggagttgaaatcgctgcaattgtatccatactgttcacctctctttatctctgtttccatctatataaaaaattttatttacgccaaaattaaaagataacatagtttggtttgaagtggaagatacgttatccacaaaggcagaaattcatcccttattactttaacttatccacatgtgaataacaattaattttatttcctaaaaccttttttatcaacagcatagacctaaaaagaaaaaacttaaacgcaaaaaatgcgattctgctcaggaatagagccatttttaccaataaaaaaaccgaagttccgattttacccggacttcggttttctgctatctttatgggaaataacgagatggcggtaccggccttcaccggtagaaaacgttttgatatttggatgctttgacagcgcgtcatggatgatttttctttcacctgacggcatcggttctaaatgcacctcttttttcgttttcgacacttgcttggccagcctgtttgccagctgatccagaatttctcttcttttccgccgataattttcagcgtcgacaacggcttggcgatactggccggagccgcggttcaaaacaagctgcgtcaatgtttccaaggcattgagtgtttgtcctcttttgccaataagcagcgccgctttttcacctttaatatgaaaacagactgttttcttgttttcttccgtaacaatctcagaaggcccggcaatggaatggatgatttcttctaaatacgctttcgcttcctgaacaggatttcttttctcttccagttctacaatcgcattcttttttccgaaaatacccaaaaaccctttatattcttcttgcaccaccgttatttctacttgatctttcgtcagttgaagttcctgaaggcctgattgaactgcttcttcgacattccgtcccgcagcagtcaccttcttcactttttctttcctccggctttctgcgtttccggatcgtgtttaatgtcaggtcctttaataaggaatgtctgagcaatcataaacaggtttccgactacccaatacagagaaagcgcgctcgggaagttgatcgcaaatacgatgatcatgatcggcataatccataccatcattgccatttgaggattctgagtcggatttcccgccatcatcagcttctgctggacaaaagtggccacaccggcaacgataggaagaatatagtaaggatccttctctcctaaatcaaaccataaaaagctgtgctgtgaaatggcttgcgtacgcataatggcgtggtagaatccgatcaaaatcggcatttgaatcaggatcgggaaacatcccgccagcgggtttaccccgtgctttgaaaacagggccattgtttcctgctgaagcttctgctgcgttttttgatctttagagctgtatttttctctgagcttctgcatttcaggctgcagcgcctgcatcgcttttgagcttcgaagctgcttgatcatcagcggcagaatcagcagacgaattaaaatcgtaacgatgatgatcgacaaaccatagttatcgcccgtcagtttcgctacgtacgtaatgacttctgacaatggatacacaacatatttgtcccagaaatgcggactattcgccgtaatcggctctttcacactcgagcacccggccagcagcacgagcataccgaccatactcagtagtaaccatattctccttttcaagaacgtttcctcctataccaatctttataaaccttgtatgtattttagcatctttcagtttcaaatggcgttcatttttcgccaaataaaaggaagcgcttttaaaaacgtgaagaaaacaaaatatgagctattttgacgaagatttcttatataatgaggtttttctgaataagtgctgcagactctttttcgtttcttcaaaactgaggtcgccggcgggttttcttgcgataataataaaatctttcggcttgagcagctctttttcctcctgaaccgcctgcctgattaaccgcttcacccgattgcgcacgacggcattgccgatttttttactgacagaaagccctacccggagctcttcctgtttcggctgatcaagcgtatacagcacgaactggcggtttgccatagacgttccgcgtttaaacactttttgaaaatcttcatttttctttaaccgatttcgcttcttcactttaattcactccgatattcactcgcagaaacttttatttctatctaaaaaaaacgggccgccggaatactgaagaaatttctccagtaccgggcgacgcatgacatctcttttctcttaatgtgaaaaaagaccactgacattattcagtggcctaagctgataatacttttctgcctttgcggcgacggcgtgctaatactagacgaccgttttttgaactcatacggcttctgaagccatgaactttactgcgtttacggttattcggttggaatgttcttttcatttatgacacctccctcgaggaatagctgttaaagacagtcttacttattatatttgtgctgcctattcattgtcaacttcagcagtgcttttatttcttacaaccataataggataacataccttaaccagattagaaaccttatttttcatattcctttttttaacgcacaaaaaaagccgcgctcccccgaaaaaacgacatgtggataatttttcggtctttttttaatatccacaatcgttatcgacaacattttcacattgctaacccctgtggacaaagatttttcaacaagttgtcaggtttgtggataagattacgagaaccattgcaagtcctcgcttaatttgatattatatttgtgttttaactcttaattacttatccagtccattctctttatccacaaattgtggataagttgtggattgttttcacacagcttgtgtagattgttgtccacaacttgtggaatttgtcgaaaagctatttttctactatactatatgttttcaacatttcgtgtgtacgaatggtcagagccatatgctctttttttgtgttctataacaggggaagggcgctgatttttaaagaaaaggagggctgtgccggataatggagaatatattggatctttggaatcaagctctagctcaaattgagaaaaagctaagcaaaccgagtttcgaaacttggatgaagtcgacgaaagcccattcgctgcaaggagataccttaaccatcaccgctcccaatgaatttgccagagactggctggagtccaggtacttacatctcattgcagataccatatatgaattaaccggggaagaattgagcgtcaaatttgtcattcctcaaaatcaggacgaagaagactttttgccgaaaccgcaagtgaaaaaagcggcaaaagaggaaccgtctgattttccccaaagcatgctcaacccgaaatatacattcgacacattcgtcatcggatcgggaaaccgattcgcccatgcagcatcactggctgtggcggaagcacccgctaaagcgtacaaccctttatttatatacgggggagtcggtttaggaaaaacccacttaatgcacgcgatcggccattatgtcattgatcataatccttcagccaaagtggtgtacctgtcttctgaaaaattcacaaatgaattcatcaactcaatccgcgataataaagccgttgatttccgcaaccgctaccggaacgttgatgtacttttgatagatgatattcaatttttagccggaaaagaacaaacacaggaagagtttttccatacattcaacacacttcatgaagaaagcaaacaaatcgtgatttccagtgacagaccgccgaaagagatcccgacccttgaagaccgcctgcgttcgcggttcgaatggggattgattacagacatcacaccgccggatctggaaacgcggattgccattctgagaaagaaagcgaaggcggagggccttgatattccgaacgaggtcatgctttacatcgccaatcagattgacagcaacatccgcgaactggaaggggcattaatccgggttgtcgcctattcatccttaatcaataaagacattaacgcagacctggctgcagaagcattgaaagatattattccgtcttctaagccgaaggtcattacgataaaagagattcagcggattgtcggacagcagttcaacattaagcttgaagatttcaaagcgaaaaagcgtacgaaatcagtggctttcccaagacaaattgcgatgtatctttcaagagaaatgacggattcttctttgcctaaaatcggggaagaatttggcgggagagaccatacaaccgtcattcacgcccacgaaaagatttcaaaactgctgattgatgacgagcagcttcagcagcaggtgaaagaaataaaagaactgcttaaataatagtgtcctcggatgaatcggggaaagtgtgaataactttttcatagccatacacagtctgtccacatgtggataggctgtgtttcctgtctttttcacaacttatccacaaatccacaggccctactattactactgctatttttaaaaatatattaattatattatccgttaggaggataaacatgaaatttacgattcaaaaagatcggttagtcgaaagtgtacaagacgttctaaaagccgtttcatccagaaccacaattcccattctcaccggtattaagatcgtcgcctcagatgaaggagtatctttcacaggaagtgactctgatatttcaattgagtcattcattccgaaagaagatgatgataaagaaatcgtgacgatcgatcagccgggaagtatcgtgctgcaagcgcgtttcttcagcgaaatcgttaaaaaactgccgatggcgactgttgaaatcgaagttcaaaatcaatatttaacgattatccgttccggaaaagccgaatttaatttaaacggccttgatgcagatgaatatccgcatctaccgcaaatcgaagagcatcacgccattcagattccgacggatcttttgaaaaacctgatccgccaaaccgtgttcgctgtgtccgcctcagaaacacgccccatcttgacaggtgtaaactggaaagttgaaaacggtgaattattatgcactgccacggatagccaccgactcgctttaagaaaggcgaagcttgatattccggaagacagtacttataacgtggtcattcccgggaaaagcttaaccgagctaagcaaaattcttgatgacagccaagagctggtggatatcgtcattacagaaacccaagttctgttcaaagcgaaaaacgtattgttcttctcaagattgcttgacggaaactatccggacacgaccagcttaattccgcaggaaagcaaaacggaaatcgtcgtgaacacgaaggaatttttacaggcgatagaccgtgcttctttattggcgagagaaggccgcaacaacgttgtaaaactttctgccaaaccggcggattcgcttgagatttcatcaaattctccggaaatcgggaaagtggtcgaagctgtgctggcagacaagattgacggcgaggaattaaatatttcattcagtccaaaatatatgatggacgcactgaaagtacttgaaggagcggacatccgtatcagctttacgggagcgatgagaccgtttcttatccgtacgccgaatgatgagaccatcgttcagctcatccttccggtcagaacgtattaatcaaacagaatgtgctgccggcttagttcggcagcttttctattcatcagccgctccctcaagttttccctttccttatttcaggattttttagtacaattagatattagtgatatttgaaagaggtcgatattatggcaaatccgatttcgattgatacagaaatgattacgcttggccagtttttaaaattagctgatgtgattcagtccggcggcatggcgaagtggtttctgagcgagcatgaggtgactgtcaacaatgaacctgacaatcgccgcggcagaaagctttacgttggagacgtggtcgcgattgaaggatttggttcatttcaagtcgtcaattaaagcgggtgacagcggttgtatatccaaaatttagaattaacatcctaccgtaattatgagcgcgctgagcttcaattcgaaaacaaggtgaatgtgatcatcggggaaaatgcccagggcaaaaccaatctgatggaagccatctatgtcctttcgatggcaaaatcacaccgcacctcaaatgacaaagaacttatacggtgggacgaagactatgctaaaatagaaggaagagtgatgaagcgcaacggggacatcccgatgcagcttgtcatctccaaaaaaggtaaaaagggcaaggtcaatcatatagagcagcaaaaactcagtcagtatgtcggagcgctgaacaccattatgtttgcccctgaggatttaaatctcgtcaaaggaagccctcaggtgaggagaagatttctcgatatggagatcgggcaggtttctgccgtttatctgtatgatttatctctttatcaaaaaatcctttcacagcggaatcattttctgaaacagctgcaaagccggaaacagactgaccggaccatgcttgacgttctcactgatcagctgattgaagcagccgcaaaagttgtcgccagacgtctgcagtttacggcgcagcttgaaaaatgggcgcagccgatccattccggcatttcccggggacttgaagaactgacgcttaagtatcacacggcgcttgatgtatcagatcccaaagatttgtcgaaaataggtaacagctaccaggagtctttttcgaaattaaaagaaaaagaaatagaacgaggcgtcacattattcggaccgcatcgggatgatgtccttttttatgtgaacggacgcgatgtgcagacttacggttcgcagggacagcagcgtacgacggctttgtctctaaagctggctgaaatagatttgattcatgaagaaatcggagaataccccattttacttttggatgatgtactaagcgagctggatgattaccgacagtcccatttgcttcatacgatccaaggccgtgtgcagacatttgtcaccacgacgagcgtggatggcattgaccacgataccttacatcaagcaggaatgttccgtgtggaaaacggtgcgttagtgaagtgaagaaatgaggtgagcgattgtatattcatttaggtgacgactttgtcgtttcaacccgcgatatcgtcggcatttttgactgcaaggtcaatgtatcgccgatcgttgaagaatttctggacagacagaaagaaaaagtagtgccgtccgtaaacggcacgccaaagtctatcgtagtcacgactgagaatatatattactctcccttatcttccggcacactgaagaaacgtgcgcaatttatgttagaaatagattcttagcggatctttacaatgaatatattatcgtttaagaaaagtgtaggtgaatgtgcatggctatggaacagcagcaaaatagttatgatgagaatcagatacaggtattagaaggtttggaagctgttcgaaagagaccggggatgtacatcggatcaactaacagcaaaggccttcaccatttggtgtgggaaatcgtcgacaacagtattgacgaagccctggccggttattgtacagatattaacatcgagattgaaaaagataacagcattaccgttaaggacaacgggcgcggaattccggtcggtatccaggagaagatgggccgccctgcggttgaagtcatcatgaccgttctccacgccggcggtaaatttgacggaagcggatataaagtatccggcggtcttcacggtgtaggggcatccgtcgtaaacgccttgtcgaccactcttgacgttacggttcatcgtgacggaaaaatccattatcaggcgtacgagcgcggtgtacctgtggccgatcttgaagtgatcggcgaaactgataagaccggaacgattacgcacttcgttccggacccggaaattttcaaagaaacaactgtatatgactatgatctgctttcaaaccgtgtccgggaattggccttcctgacaaaaggcgtaaacatcacgattgaagacaaacgtgaaggacaagaacggaaaaacgagtaccactacgaaggcggaatcaaaagctatgttgagtacttaaaccgttccaaagaagtcgttcatgaagagccgatttatatcgaaggcgagaaagacggcataacggttgaagttgcattgcaatacaacgacagctatacaagcaatatttattctttcacaaataatatcaacacatacgaaggcggcacgcacgaggccggatttaaaaccggtctgacccgtgtcataaacgactatgcaagaagaaaagggattttcaaagaaaatgatccgaatttaagcggggatgatgtgagagaagggctgactgccattatttcaattaagcaccctgatccgcaattcgaagggcagacgaaaaccaagctcggcaactccgaagcgagaacgatcactgatacgctgttttcttctgcgctggaaacattccttcttgaaaatccggactcagcccgcaaaatcgttgaaaaaggtttaatggccgcaagagcgcggatggcggcgaaaaaagcccgggaattgacccggcgcaaaagtgcgcttgagatttccaatctgccgggcaaactggcggactgttcttctaaagatccgagcatttccgagctgtatatcgtagagggtgactctgcgggcggatcagcgaaacagggacgggaccgtcatttccaagccattctgccgctgcgcggtaagattctgaacgttgagaaagccagacttgataagattctctcaaacaatgaggtcagatcaatgatcacggccctcggaacaggaatcggagaagattttaatcttgaaaaagcgcgttatcataaagtggtcatcatgacggatgccgatgttgacggcgcccatatcagaacgcttttattaacgttcttctacagatacatgcgggaaatcatcgaaaacggctatgtctacattgcccagccgccgctttataaagtgcagcagggaaaacgggtggaatacgcttataacgataagcagcttgatgagctgttaaaagagcttccgcaatcacctaagcccggcctccagcgttataaaggtcttggagaaatgaacgcgactcagctttgggaaacgacaatggaccctgcgaccagaacgcttctgcaagtcaatcttgaagatgcaatggacgctgacgagacttttgaaatgctgatgggtgacaaagtagaaccgcggagaaacttcatagaagcaaacgccagatacgtgaaaaatcttgatatttaaccaagaaagccttattttcgttaagaaataaggcttttttctcaaagcggcttctaaagcctctgaaaacccgcaaaacccgtatattctactaaattaatgtgtataaacacaagtttattgatataatggagaatagtgaaatcgtattgaagatcataatggacaatctactcccacattatttcatgtgatacttcagggaggtttttttaatgagtgaacaaaacacaccacaagtacgtgaagtcaatatcagtcaggaaatgcggacatccttcctggactatgcaatgagcgttatcgtatcccgggcgcttccggatgtgcgtgacggtctgaagccggttcacagacggattttgtacgcaatgaatgatttaggcatgaccagtgacaaaccatataaaaaatctgcccgtatcgtcggtgaagttatcggtaagtaccacccgcacggtgactcagcggtttacgaatcaatggtcagaatggcgcaggattttaactaccgctacatgcttgttgacggacacggcaacttcggttcggttgacggcgactcagcggccgcgatgcgttacacagaagcgagaatgtcaaaaatcgcaatggaaattctgcgtgacattacgaaagacacgattgactatcaagataactatgacggttcagaaagagagcctgccgtcatgccttcgagatttccgaatctgctcgtaaacggggctgccggtattgcggtcggaatggcgacaaacattcccccgcatcagcttggggaagtcattgaaggcgtgcttgccgtaagtgagaatcctgagattacaaaccaggagctgatggaatacatcccgggcccggattttccgactgcaggtcagattttgggccggagcggcatccgcaaggcatatgaatccggacggggatcaatcacgatccgggctaaggctgaaatcgaagagacttcatcgggaaaagaaagaattattgtcacggaacttccttatcaggtgaacaaagcgagattaattgaaaaaatcgcggatcttgtccgagacaaaaaaatcgaaggaattaccgatctgcgagacgaatccgaccgtaacggaatgagaatcgtcattgagatccgccgtgacgccaatgctcacgtcattttgaataacctgtacaaacaaacggccctgcagacgtctttcggaatcaatctgctggcgctcgttgacggacagccgaaggtactaagcctgaaacaatgtctggagcattatcttgatcaccaaaaggttgtgatccggcgcagaacggcttacgaactccgcaaagcggaagcaagagctcacattctggaaggtttaagaattgctctcgatcatttagatgccgttatttctcttatccgcaattcccagacggctgaaattgcgagaacgggtttgatcgaacaattctcactgactgaaaaacaagcgcaagctattctggatatgcgccttcagcgattaaccggtctggagcgcgaaaagattgaagaggaatatcaatcacttgttgcgcttatcgctgagctgaaagatattttagccaatgaagaaagagttcttgagatcatccgtgaagaacttaatgaaatcaaagagcgtttcaatgatgagagacgcactgaaatcgtgacgtccggtcttgaaacaattgaagatgaagatcttatcgagagagaaaatatcgtcatcacactgacccataacggctatgttaaacgtctcccggcgtccacataccgcagccaaaaacggggcggaaaaggcgtacagggaatgggaacgaatgaagatgactttgtggaacacttaatttccacatcaacgcacgatacgattctgttcttctctaataaagggaaggtataccgttctaaaggatatgaaatccctgaatacggccgtacggcaaaaggcattccgattattaaccttctggaagttgaaaaaggcgaatggattaatgccattattccggtcagcacgtttgatgaggagcaatacctcttctttacgaccaaacaaggggtgtcgaaacgtacggcactgtcccagtttgcgaatatacggaataacggtctgatcgccctaggtctccgggaagacgatgaactgatggccgtccgcctgactgacggcaagaaacaaatcatcatcggaacgaagaacggtttgctgatccgtttccctgaagaagatgtaagacaaatgggacgcacagctgcgggtgttaaaggtatcacgctgacagacgatgatgtcgttgtaggcatggagattcttgaagaagactcccatgtcctcatagtgacagaaaacggctacggcaaacgcacaccggcttcagaatacagagttcaaagccggggcggaaaaggccttaaaacatgtaaaatcactgacagcaacggtccgttagtaactgtgaaagcaacaaaaggcgaagaggacttaatgattattacggcaagcggcgtgttaatcagaatggatattaatgatatctccactacgggacgcgtaacacaaggcgtccgtctgatccgcatgtctgatcaagagcatgtagccactgtggcgcttgtcgaaaagaatgaagaagagccggaagaaacggaagaagtataaacgaaaaagcgcagctgcaacaggctgcgcttttactatataaagaaataaaaaaaagctttgacacatggtgatgatgctgatataattctttttgttgtctttttaatagaaaggcaagcctagcgaaaatattttttaaaaaagtattgacctagcaaactgaaaatgttatgattaagaggtcgcttcgagaggggcggaaaagttctttgaaaactaaacaagacaaaacgtacctgttaattcaaagttttaaataaatcgcacagcgatgtgcgtagtcagtcaaactactttatcggagagtttgatcctggctcaggacgaacgctggcggcgtgcctaatacatgcaagtcgagcggacagatgggagcttgctccctgatgttagcggcggacgggtgagtaacacgtgggtaacctgcctgtaagactgggataactccgggaaaccggggctaataccggatggttgtttgaaccgcatggttcagacataaaaggtggcttcggctaccacttacagatggacccgcggcgcattagctagttggtgaggtaacggctcaccaaggcgacgatgcgtagccgacctgagagggtgatcggccacactgggactgagacacggcccagactcctacgggaggcagcagtagggaatcttccgcaatggacgaaagtctgacggagcaacgccgcgtgagtgatgaaggttttcggatcgtaaagctctgttgttagggaagaacaagtgccgttcaaatagggcggcaccttgacggtacctaaccagaaagccacggctaactacgtgccagcagccgcggtaatacgtaggtggcaagcgttgtccggaattattgggcgtaaagggctcgcaggcggtttcttaagtctgatgtgaaagcccccggctcaaccggggagggtcattggaaactggggaacttgagtgcagaagaggagagtggaattccacgtgtagcggtgaaatgcgtagagatgtggaggaacaccagtggcgaaggcgactctctggtctgtaactgacgctgaggagcgaaagcgtggggagcgaacaggattagataccctggtagtccacgccgtaaacgatgagtgctaagtgttagggggtttccgccccttagtgctgcagctaacgcattaagcactccgcctggggagtacggtcgcaagactgaaactcaaaggaattgacgggggcccgcacaagcggtggagcatgtggtttaattcgaagcaacgcgaagaaccttaccaggtcttgacatcctctgacaatcctagagataggacgtcccttcgggggcagagtgacaggtggtgcatggttgtcgtcagctcgtgtcgtgagatgttgggttaagtcccgcaacgagcgcaacccttgatcttagttgccagcattcagttgggcactctaaggtgactgccggtgacaaaccggaggaaggtggggatgacgtcaaatcatcatgccccttatgacctgggctacacacgtgctacaatggacagaacaaagggcagcgaaaccgcgaggttaagccaatcccacaaatctgttctcagttcggatcgcagtctgcaactcgactgcgtgaagctggaatcgctagtaatcgcggatcagcatgccgcggtgaatacgttcccgggccttgtacacaccgcccgtcacaccacgagagtttgtaacacccgaagtcggtgaggtaacctttatggagccagccgccgaaggtgggacagatgattggggtgaagtcgtaacaaggtagccgtatcggaaggtgcggctggatcacctcctttctaaggattttaacggaatataagaccttgggtcttataaacagaacgttccctgtcttgtttagttttgaaggaactttgattctttcatatggtagatgggcctgtagctcagctggttagagcgcacgcctgataagcgtgaggtcggtggttcgagtccactcaggcccaccatctttacccaatacggggccttagctcagctgggagagcgcctgctttgcacgcaggaggtcagcggttcgatcccgctaggctccaccaacgtgttctttgaaaactagataacagaagtaattcacattcaattagtaatgcaagatatcacgtagtgattctttttaacggttaagttagaaagggcgcacggtggatgccttggcactaggagccgatgaaggacgggacgaacaccgatatgcttcggggagctgtaagcaagctttgatccggagatttccgaatggggaaacccaccactcgtaatggagtggtatccatatctgaatacataggatatgagaaggcagacccggggaactgaaacatctaagtacccggaggaagagaaagcaaatgcgattccctgagtagcggcgagcgaaacgggaccagcccaaaccaagaggcttgcctcttggggttgtaggacactctgtacggagttacaaaggaacgaggtagatgaagaggtctggaaaggcccgccataggaggtaacagccctgtagtcaaaacttcgttctctcctgagtggatcctgagtacggcggaacacgtgaaattccgtcggaatccgggaggaccatctcccaaggctaaatactccctagtgaccgatagtgaaccagtaccgtgagggaaaggtgaaaagcaccccggaaggggagtgaaagagatcctgaaaccgtgtgcctacaagtagtcagagcccgttaacgggtgatggcgtgccttttgtagaatgaaccggcgagttacgatcccgtgcaaggttaagcagaagatgcggagccgcagcgaaagcgagtctgaatagggcgaattgagtacgtggtcgtagacccgaaaccaggtgatctacccatgtccagggtgaagttcaggtaacactgaatggaggcccgaacccacgcacgttgaaaagtgcggggatgaggtgtgggtaggggtgaaatgccaatcgaacctggagatagctggttctctccgaaatagctttagggctagcctcaaggtaagagtctcggaggtagagcactgattggactaggggcccctaccgggttaccgaattcagtcaaactccgaatgccgatgacttatccttgggagtcagactgcgagtgataagatccgtagtcgaaagggaaacagcccagaccgccagctaaggtcccaaagtatacgttaagtggaaaaggatgtggagttgcttagacaaccaggatgttggcttagaagcagccaccatttaaagagtgcgtaatagctcactggtcgagtgactctgcgccgaaaatgtaccggggctaaacgtatcaccgaagctgcggactgttcttcgaacagtggtaggagagcgttctaagggctgtgaagcaagaccggaaggacttgtggagcgcttagaagtgagaatgccggtatgagtagcgaaagaggggtgagaatcccctccaccgaatgcctaaggtttcctgaggaaggctcgtccgctcagggttagtcgggacctaagccgaggccgaaaggcgtaggcgatggataacaggttgatattcctgtaccacctcctcaccatttgagcaatggggggacgcaggaggatagggtaagcgcggtattggatatccgcgtccaagcagttaggctgggaaataggcaaatccgtttcccgtgaaggctgagctgtgatggcgagcgaattatagtagcgaagttcctgattccacactgccaagaaaagcctctagcgaggtgagaggtgcccgtaccgcaaaccgacacaggtaggcgaggagagaatcctaaggtgatcgagagaactctcgttaaggaactcggcaaaatgaccccgtaacttcgggagaaggggtgctctgttagggtgcaagcccgagagagccgcagtgaataggcccaggcgactgtttagcaaaaacacaggtctctgcgaagccgtaaggcgaagtataggggctgacgcctgcccggtgctggaaggttaagaggagcgcttagcgtaagcgaaggtgcgaattgaagccccagtaaacggcggccgtaactataacggtcctaaggtagcgaaattccttgtcgggtaagttccgacccgcacgaaaggcgcaacgatctgggcactgtctcaacgagagactcggtgaaattatagtacctgtgaagatgcaggttacccgcgacaggacggaaagaccccgtggagctttactgcagcctgatattgaatgttggtacagcttgtacaggataggtaggagccttggaaaccggagcgccagcttcggtggaggcatcggtgggatactaccctggctgtattgaccttctaacccgccgcccttatcgggcggggagacagtgtcaggtgggcagtttgactggggcggtcgcctcctaaaaggtaacggaggcgcccaaaggttccctcagaatggttggaaatcattcgcagagtgtaaaggcacaagggagcttgactgcgagacctacaagtcgagcagggacgaaagtcgggcttagtgatccggtggttccgcatggaagggccatcgctcaacggataaaagctaccccggggataacaggcttatctcccccaagagtccacatcgacggggaggtttggcacctcgatgtcggctcatcgcatcctggggctgtagtcggtcccaagggttgggctgttcgcccattaaagcggtacgcgagctgggttcagaacgtcgtgagacagttcggtccctatccgtcgcgggcgcaggaaatttgagaggagctgtccttagtacgagaggaccgggatggacgcaccgctggtgtaccagttgttctgccaagggcatcgctgggtagctatgtgcggacgggataagtgctgaaagcatctaagcatgaagcccccctcaagatgagatttcccattccgcaaggaagtaagatccctgaaagatgatcaggttgataggtctgaggtggaagtgtggcgacacatggagctgacagatactaatcgatcgaggacttaaccaatttgaatgtatacttattgttatctagttttgagagaacactctcaatggtttggtggcgatagcgaagaggtcacacccgttcccatgccgaacacggaagttaagctcttcagcgccgatggtagtcgggggtttccccctgtgagagtaggacgccgccaagctatcattacggtaaaggcagctcatcatgagctgccttttttgtttacaagtattgcttcaggaatttagaaacgtaatacggaaatttgcgttccgtgacctctaagaaccgtcggatcatcacataatcatcactgacatgctgtgtcagcagttcataccaccactccgtttcatatctcgcaatcatcccaatattgtagagaaccaaataatgaataatcatttccggaagatgcaggaagtgatcacgctgagagggaatgtaatattgatttttctccaagtgaaacaataaatttggagaagaccaaggttccctgtctatcgggtcagcctcaaaaaacaagtggttatggtctttcctcagaaaagaccacttcaaatgatggctgatatattcagcaaagcgggaatcagacatattgtaatgaatcaccgcatgctcaggcactgaaataaggtcatcgttcagctctacttgggtcatccaattctttttctcttggaagtaaaagacagtatgcaattcaggtatggctgtcagtaatttcttcattgtgtaccgttcttcctcaagaccagctatcccgaataagtgcttcattacatgaatacataagccattgcgctgcaccttcacttcatcatccctaaaggagtaattttgctttttgcgtttccgggcagtcacgccatgcgcgagtactgaagcgtggcttgggtagcttggatctgtggtcagaaggcaggctttcagcaattgtgacatcccgtaaaacaacagaataggcttaatttctaaaggagaaagagatgcctgcttataaaaggactcggcgtgtttgataaagaatatgaagcgctcactgttcttaaacgcatatcgttttggttcttccatgccgctttctgtatagactttgtttagaaatttctgggaagattctacggaataaaataatgataactctttccactcatgatctctcatatgtatttttaaaccctttcctttatctaaatatttcaactctttttcgcttccttgacatgctgttttctagttgataatctacatataatattttgccgaaaagagggggatttactaatgtgggaaagtaaattttcaaaagaaggcttaacgttcgatgatgtactgctcgtaccggctcaatcagacgtacttccgcgtgatgtggatttatctgttgaactgacaaaaacgttaaagcttaatattcctgtcatcagtgcgggaatggatacagtaacagaatcagcaatggcgattgcgatggccagacagggcggcttgggcattatccataaaaacatgtccatcgaacagcaggctgaacatgttgacaaagtcaaacgttctgaacggggcgttattacaaatcccttctttttaacacctgatcatcaagtattcgatgcggagcatttgatggggaaatacagaatttccggtgttccgatcgtagataataaagacgatcaaaagcttgtcggtatcattacaaaccgtgatcttcgctttatctctgattattcaatgaaaatcagtgatgtcatgacaaaagaagagctggttacggctcctgtgggaaccacattagacgaagcagaaaaaatcttacagaaacataaaattgaaaaacttccgttagtggatgaccaaaacaaattaaaaggtcttatcacgatcaaagatattgaaaaggttatcgaattccctaattcatctaaagatgaacacggacgccttattgtcggcgctgcggtaggcgtgacaggcgatacaatgacacgcgtcagcaagcttgttgaagcgaatgtcgacgttatcgtggttgatacggctcacggacattccagaggcgtactgaacacagttgcgaaaatccgtgaaacatatcctgaactgaacattatcgcaggaaatgttgcaacggctgaagcgacaaaagctctgattgaagccggagcaaatattgtcaaagtgggaatcgggcctggttctatctgtacgacacgcgtcgttgcaggtgtaggcgtaccgcagatcactgccatttatgattgtgccactgaagcgagaaaacacggcgcgacaattatcgcagacggcggtattaaattctccggagatattacgaaagcgttggcttcaggcggacatgccgtaatgctcggaagcctgcttgccggtacttcagaaagcccgggagagactgaaatctatcagggcagaagatttaaagtgtatcgcggtatgggttctgttgctgccatggaaaaaggcagtaaagaccgatatttccaagaagaaaataagaaattcgtccctgaaggtatcgaaggacggactccgtacaaaggtcctgtagaagaaacagtgtatcagcttgtcggcggtcttcgttcaggtatgggatattgcggttcaaaagacttgcgcgctttaagagaagaggctcaattcatccgtatgacaggtgccggtcttcgcgaaagtcatccgcatgatgtccaaattacgaaagaatcaccaaactacacaatctcataattgttacaaataaaaaacatttgacagggtcgctgactctgtctattttttttatatcgagtgtgataaaatttatactgttgtgttttgaatttgaatatgtccttaacggcttaattatagatttaaaatgaatgacggaggtcgtaagattgaacatcacgaaatggaaacagctgttggtgtcattagtggtactggcactggccgcaacttgctttgttccgatgtctaaagcggaggcagccggcaatgacccgattgatgtcaacgcatcagctgcgataatgattgaggcttcatcgggaaaaattttatacagtaaaaatgcagacaaaagactgccgattgccagcatgacaaaaatgatgactgaatatctgcttctggaagccattaaagaaggaaaagtgaaatgggatcaaacgtatactcctgatgattatgtctatgaaatttctcaagacaacagtttatcaaacgtcccccttcgaaaagacggcaaatacacggttaaagaactgtatcaggccatggcgatttactctgctaacggagccgcgattgcagttgccgaaattcttgccggaactgaaacgaaatttgtcgctgaaatgaatgcgaaagccaaagaattaggcatgacaaactatgattttaaaaatgccacagggcttgtgaatgaagatcttcacggcaaacagccgcaaggagaaggcgttaaagaagagagtgaagtttctgctaaagacatggcgcttcttgcagaccgcctgatcactgattatccggaagttctcaaaacaacaagcatcgctaaaacgaaattcagagccggcactgatgatgaaatggacatgccgaactggaacttcatgttaaaaggtcttgtttctgaataccctggcgttgacggcttaaaaacgggttctactgattctgcgggatcttgttttacaagcacagcacagcggaacggaatgcgggtcatcaccgttgtattaaacgcaaaaggcaacctgcataccggacgttttgatgaaacgaaaaaaatgctcgattacgcatttaacagcaatttctcaatgaaagatctttaccctgaaggctctcaagtaaaagggcacaaaacggttgacgttgaaaaagggaaagacaagcaagtcgatattgttactgacaaggcgctttctattcctgtgaaaagcggggatgaaaagaactataaagccgaagggactatagataaaaaagaaatcacggctcctgtgaaaaagggaacgaaagtcggaacgctgacagttacatacaaaggcagtgacaaagactatggcttcctcaaatccaaagagttcagcgtgaatcttgtaacgaaaaatgatgtagataaagcaaactggtttgttcagatgatgcgcggcatcggcggatttttctccggtatctggaacagcgccgttgacacggtaacaggctggttttaagaaataagaaagagctctgatgaaagttagggctcttttgcttaatatactgaaaaaaccaaattattagtaaaaaaatgatatctatcttattcatctcgctgtaaaataagaatacccatatgaaatattgtatttctgggatacaataagagatagacattatctaactatacattgactagggggaccaaataatggctcaaacaggtactgatcgtgtaaaacgcggcatggcggaaatgcaaaaaggcggcgtcatcatggacgtagtaaatgctgaacaagcgaagattgcggaagaggcgggagctgttgccgtaatggcgttagaacgcgttccggctgatattcgcgctgccggcggtgttgcccgcatggctgatccgacaatcgttgaagaagtaatgaatgctgtatccattcccgtaatggcaaaagcgcgtatcggacatatcgttgaagcgcgtgtccttgaagcaatgggagtagattacatcgatgaaagtgaagttctgactccggctgacgaagaatttcatttaaataaaaatgaatatacagtcccgttcgtatgcggctgccgtgatctcggcgaagcaacgcgccgtatcgccgaaggagcttccatgcttcgtacaaaaggcgaaccgggaacaggaaacattgtggaagctgtccgccatatgagaaaagtaaacgcgcaagtgcgcaaagttgttgcgatgagcgatgatgagctgatgactgaagctaaaaacctcggcgctccttatgaactgcttcttcagatcaaacgtgacggcaaactgcctgtagtgaactttgctgccggcggagtagcgacgcctgctgacgcggcattgatgatgcagcttggcgctgacggcgtatttgtcggttcaggtattttcaaatcagacaaccctgctaaattcgccaaagcaattgttgaagcaacgactcattatacagactacaaactgatcgctgagctttctaaagaattaggcacagcaatgaaaggcatcgaaatctcaaatctattgccggaacagcgtatgcaagaacgcggctggtaaaaccataggagagctgtaagcatgttaacaattggtgtacttggacttcaaggagcagtaagagaacatattcgttcaattgaagcatgtggttcaaaaggtgtcgtcattaagcgtcctgaacagctgaatgacatcgacggcttaatcctgccgggcggggaaagcacgacgatgcggcgtttaatggatacgtatcattttatggagccgcttcgcgagtttgccgctcaaggcaagccgatgttcggcacatgcgccggtctgattatcttagccaaagagatagcgggaacggataacgctcatttagggctgttgaacgtagttgtcgagcgtaattcctttggccgtcaggtcgacagctttgaagctgatctgacgattaaaggccttgatgagccgtttacgggtgtatttattcgcgcaccgcatattttaaaagccggagaagatgttgaagtgctttgtgagcataacggacgcatcgtggctgcaaagcagggaaatttcctcggctgctcgttccatcctgaactgacggatgatcaccgggtgacagagctgtttgtgaagatggcggaaaagcataagcaggaaacagctgtataaaacagttgaaaaccgctgatacttatagtacattataatcacaaataaagatcgaaaagcgttgacaggaagcagtaggaagcccctctttcaaagagagccgatgggtggtgcgaatcggtgaaagatgctgtccgaatccgtccttgagcgaaatgctgaaaacaagtaggcatttacgggaaaaccgttatgtgttaaagcggaaagcaagtgtgagcttgttttcaatcagggtggcaacgcgagagctctcgtcccttttaggggatgagggctcttttttattttcgataaaaacagataggagttgttaggcatgattgatacgaaggtgctgagagccaattttcaagaggtaaaagcgaagctcattccaaaaggcgaagacttatctgactttgacaagtttgaagagctggatgaaaagagaagagagcttatcggtaaagtagaagaactgaagggaaaacgcaatgaggtgtctcagcaggtcgccgttttgaaacgggagaaaaaagacgctgatcatattattaaagagatgcgtgaagtaggcgaagaaattaagaagcttgatgaagagcttcgtactgtcgaaacgacgctcgaaaccatccttctgtctattccgaacatcccgcacgattcagttcccgtcggagaaacggaagatgataacattgaaattcgcaagtggggagaggcgccggcattttcatatgagccgaaaccgcattgggatatcgcagaccgcttaaacattcttgatttcgaacgcgcttcaaaagtaacaggcagccggtttgtgttttataaaggattaggcgcccgcctcgaacgcgcgctctacaactttatgctggatcttcacgtggatgaatatgattacacggaagtcattcctccttatatggtaaaccgtacgagcatgacaggtacgggacagcttcctaaatttgaagaggatgcttttaaaatcagagaagaggattatttcttaattccgacggcggaagtgccgattacaaatatgcaccgcgatgaaatcttatccggtgagaacctgccgatcaattatgccgcgttcagcgcctgcttccgttcagaagcgggatccgccggccgtgatacacgcggtttgatccgtcagcatcagttcaacaaggttgagcttgtaaagttcgtgaagccggaagattcttatgaggagcttgaaaaactgacaaatcaagctgagcgggtgcttcagctgcttgaactgccgtatcgcgtcatgagcatgtgtaccggtgatctcggctttacagctgcgaaaaagtacgatattgaggtatggattccaagccaagacacataccgtgaaatttcttcttgcagcaactttgaggccttccaggcaagacgtgcgaacattcgtttcagacgcgaagcgaaaggcaagcctgagcatgtgcatacattaaacggttcaggtcttgcagtcggcagaactgtagctgccatcttggaaaactaccagcaggaagacggaagtgtcatcattcctaaagtgcttcgtccttatatgggaaataaagaagtcatcaaaccataaaaaggtgcgccctagaggcgcgccttttttgctgcccggtatagagcggcggcattccgggctgtactttccaggttaaaacggccggatgctaaggcgtcttcaagacttacagcgccgggcacgatagaaaatacagctgttattcctgcgctgtaaacatgctcaaaatttttgcctaaggagcccgccaatgcgataacgggaatttcttgagcggctgcgcgtgcggcgatcccggcgggggttttgccgaatatcgtttgtccgtcaatctggccctctccggtaatgacaaggtcagcatctcttatctgatctgagaaggacagtgtatctaatacaacgtcaatcccgctttgaatttctgcctgtaagaaagcgatcagtccagcgcccagcccccctgcggcgcccgcgccttttacggtatccgcttcgatatcgtgctgacgtctcaatacgtcagcgaaatggtataaattgcgatccaatacaactttagtcttctcggacgcccctttttgcgggccgaagacatatgacgcgccgttttcaccggtcaggggattttcgacatcacatgcggcacgaaaacggatatgtttcagatcaggggagagcccgcttatatcaatagaagctagggtgtgcagagcgcctcctccgtcatgtatctcctgaccttcctcatttaagaaacgcacaccgagcgcgctcgccattcctgttccgccgtcattggttgcactcccgccaagcccgatgatgatctcactcgccccgcgggaggctgcatccgctatcagttcacccgttcctcttgtcgttgtgttcaacggatctctgagatggcggggaacgagatggagtcccgatgcttccgccatttcaatgactgccgtgcgtccgtctcccagaagtccatatgcggcgtttaccggcgttcccagcggaccggtcacagtttttttgatgatgcttccgccagtggcatccgtcaaagcctgaacggttccttctccgccgtcggccgcgggtatcttggtatattccgcgtcagggaagaccgctttgaatcctttttctatgctgtcagcggcttcttttgatgtcatgctttctttgaaagaatcgggtgcgatgatgattttcattatgttctccacctttatgagcaggttatctgtttgaatctattcttgatttttactttgttttcctgcccgtatggcatactgaggttgaattggacgcaagacttttgtatgatagtaaagctgacggaaaagctgtttaagaaatgaaataaaaaatatgaaaaagcgcttgactgaaatttgggtcatgtggtatattattaaatgtcgatacggaggaatacccaagtctggctgaagggatcggtcttgaaaaccgacaggggtgtcaaagcccgcgggggttcgaatccctcttcctccgccatattgattttaaacctaatgaaactcgagcatatattggagattgttttgtccgctgcatctgatgcagcggattttttatatgcaaaaaaagcgattttctctgttcggggaaaatcgctttgctatttttatttgtttctgttttcgctgatcacgtgactgattttttcgatcaaaggttccagtgactgttcatcagcttcaaggtcataatcttcaatgcgtactttcagtacagggcaggcgttaaaaccgctgatccagtcttcgtaccgtgtatacatctcttcccaataagagcggtttgtctgcagctccatctcgcggccccgcttttcaatccggcttataatgtattcaaggtcgccttctaagtagatcaaaacatcaggatgcgggaaatacggcgtcatgaccatcgcctcaaataggcttgtgtatgttgtgtaatctgtcagcgacatggttcctttatcggcatgcatttttgcgaatatgcctgtatcttcataaatcgaacggtcctgcacgaatccgccgcctgattcaaacatgtttttttgctctttgaaccgctcagccagaaaataaatttgcaaatggaagctccagcgttcaaaatcgtgataaaacttctctaaataagggttttcatccacttcctcaagtgaggtatgaaacccgagccgttttgctaaagctttggtcaaagtcgattttccgactcctaccgttcccgctactgttataatggcgttgtttggaatatgaatgtctttcatttaataagctcctttacctgacgggcaattctttcatagtctgtcttattcaaaacaaagtcttcagtatcaccgtcaatggtcagtacagatatatccggatcttcttcctgaagctgtctgatggctgtgtcgtaatctgcaatgagatgttccagatattgatgttcgatatttttctcaaacgggcgcccgcgtttttcaatgcgttgaagcaatgtcggcaggcttgcctttatgtatacaatgatattcggcttcggcaggtcgtgagtgagcagatgatagatctgcttatacttctcaagcttttggccgtgcaatgtacgctctgcgaaaataacatttttataaatatgataatcggacaaaacgggctgtccttgttttaaataatctcgatcggtgtcttcaagctgtttatacctgtgacatagaaaaaacatttcaagctggaaactccactcctcgatattgtcataaaacttatcgagataagggttgtcttccacaatctcattaatcataggaaaaccgagctcttcagaaagcatcgtagcgagtgtcgtttttcctgccccgataggaccttctaccgcgataaaaggggctctgttcattgaaaatcctccttaattctgcaaacatccgtcagctgccggcctttatattgtatcacactcacagaaaagcccatgaaaaaagacgctcccaattaacgaaacgtctcttttacaatatgaaattgatcgccgagcaaaagccagttttgcgggaaagaaaggccgagtttccaatagctgattcctcttaaatgaagttctttaattaaattgaatttcgcttgaatggatcgtgcgtcttcaaaccatacttcatgccgtctctgatttgcatccgtgtatcggaagaagggagcctgggcggtttcgtcatattgaatgtcgactttatagcgtgctgccagagcgattgcctgctgaggactgacggctttcgctgtcgttccctgtttgaaaggcagtgtccaatcatagccgtacatattctggcccatgacgatttttgaagaaggcatttccgtcagcgcgtactcaatgacatttcttacagggccgataggtgatacggcctcagccgggcctccgctgtacccccactcatatgtcataatcacgacgaaatcgacgatttctccatgtgccctatagtcatgagcttcgtaccatttgccggcctgagtcgcgctcgttttcggagcaagcgccgttgaaatcttccagccttcccgatgaaaaatcgttctcgcttcacgtaaaaaacgattgtaggcttccctgtcctgtggacgtaaatattcgaaatcaaagtgaatatcgcgaaagccgtactttttagccgtggagacgatttcctgaaagagttttgttttcactgtattgtcgttcaagatgagccgcccgagttcatcgctgaatgcgtcattttcaaggttggtgatgatcatcatcagtgtggtgttgtgcctgtcactgatgctttttaaattggtcagaggcggttcctttaaagtcccgttccgctgcacttgaaaactgaatgcgccgaggtatgttaaataaggagaggcctcccttgccgcctgctgaagattagcgcttacgctcgttccccgcggttctatatatgcgtttgattcgatatcgggcttattcgcctgctgcggaatgtaaaggcgggttccgactctcaatgtggtgccgggctgaattccgttcaccctcgcaagctccgcggccgatatatgaaaacggccggcgattgacgcgagagtatcaccttgttttacttcgtaatattgaccctcaatcgggatgacaagggtttgtccgacaaccaatgtattgggattaggcagtttatttgcttccgcaatgacatttgcggctgtccggtagcgcgccgcaatagcggaaagcgtgtcgccccgtttcactatatagatctgaatgaaaaacgcctcctttcatatccgctatcaaatatatgaaaaaaggaggctgatcatgtttatttttcgccggtaatttgtttttccgtggttatttctgcgaagagaacattctccatcatggtcaaagcgaaatcattgtcttcgtcgttattggaagcggtgcagtctttcggaatggcaatgctgtattctctcatataagcgtcgttggccgtgaacagcacacaaatgttcccggcaatccccgtgatgattaatcggttcacttgtaattcggtcagaagggtgtgaagcgccgtttcgtaaaaagcggaatgcttcggtttaatgagaaaataatcatccggctgaggcgaaatatcttttataatggaggcgcttctgtcgttgctgcattcctccctgatggcatcaatatcagccttccagagcccgtaatgatcattaatataaataatcggccagttgctttgttttgcatgcttctttaatgataaaatacgggggacaatttgtttggttttttcagcaagacgttcgcccatatcaaattgaaaattgttgatcatatcgacaatcagaagggctgtgttgttaggttcagacaataccggcaactcctttctgctggggtattcctattttaacctttatgagacatgaaaaaacttaagaagagagctcgaaccgatgaatgatgaatattatatgagagaagccataaaagaagcgaagaaagccgaagagaaaggtgaagtgccgatcggagcagttcttgttctgcacgatgagatcgtggcgcgggcgcataatctgcgggagactgaacagaggtcgcttgcccacgccgaaatgctggcgatagacgaagcgtgccgtaagctggggacatggagacttgaggatgccgttctctatgtcactttggagccgtgtccgatgtgcgcgggagccgtcgtgctttcgagagtcgataaggtcgtattcggcgcatttgatcccaagggggctgtacaggaacgctgatgaacctcttgcaggaagagcggttcaaccaccaagcggaagtggtgagcggcgtgctcggagaagagtgcggagaaatgctcagcgcttttttcagaaagctgcgccggcaaaagaaagacatgaggaaaaagttgtctgagtagtacggttgcattttctgcctgaagcagatatacttatgtgtgcatcatgaatggtgcgcatatcaaaatttgatatttattttgccgtgctaagcggggaggtagcggtgccctgtacccgcaatccgctctagcggggccgaatcccttctcgaggttcgtttactgtaaggtctgccttaagtaagtggcgttgacgtctgggtcctgcgcaatgggaattcatgaaccatgtcaggtccggaaggaagcagcattaagtgaaacctctcatgtgccgcagggttgcctgggctgagctaactgcttaagtaacgcttagggtagcgaatcgacagaaggtgcacggtaaatcaatcatcaaatttcagactcacctgttatggcaggtgagttttttcgtatatgaaaaacgggttttggcgttaaaagcacgttcatgtataataaacatgatgaataacagaggagggcgcatcctgtgggttaccaagctttatatcgagtatttaggcctcagcagtttgaagatgtggtcggacaggaacacattacgaaaacgctgcaaaatgcccttttgcaaaagaaattttctcatgcatatctgttttctggaccgcggggaacgggaaaaaccagtgcagctaaaatatttgcgaaagcagtcaactgtgagcacgcccctgtagaagaaccgtgcaatgagtgcgcggcatgcaaggggatcacaaatggctctatatcagatgtgattgaaatagatgcggcgtcgaataacggcgtagacgaaatccgcgacatccgtgacaaagtaaaatttgccccgtcggccgttacttacaaggtatatattatagatgaggtgcatatgctctctatcggcgcattcaatgcgcttctgaaaacgctggaagaaccgccggcacattgcattttcatattagctacgactgagcctcataagattcctttaaccattatctccagatgtcagcgttttgacttcaaacggattacatccaaagcaattgtcggacgaatgaagacaatcgtcgatgcagagcagctgaaggtggaagaaggagcccttgatatcatagcgagtgctgcggacggaggaatgagggacgcgctgagcctgctcgatcaagctgtatcattcagcggcgaggagctgtcggtggatgacgctttgctcattaccggagccgtttctcagcactatattggaaaactggcatctgctcttcaccgcaaacaggtttccgaggcattggaaacactgaatgaattgctccagcaggggaaagatgcggccaaactgattgaagatatgattttctatttcagggatatgctcttgtaccaggccgctcccggtttagaaggagtcctggagaaggtgaaggtcgatgaaacgtttcggaatctgagcggtgacataccggcccccgctttatatgagatgattgatatcctgaataaaagccatcaggaaatgaagtggacgaaccacccaagaatcttttttgaagtggctgtcgtgaaaatatgccaaacggcacagcaatccgccggagacatccctgaggtcggcatgctgatgaataagatccagcagcttgagcaggaagtagaaaggctgaaaacctccggtgtgaaggttcagatggaaagcgctccgaaagaagctccgcgtcctcaaaaaggcggaaaaagccattataaagccccggtcggaagaattcatgagatattgaaggaagccacaagacctgatcttgaacagcttaaaagcagctggggcaagctgctggcacacctgaaacagcagaataaggtgtctcatgcggctcttttgaatgacagtgaaccggtggccgctgctcaaaaggcatttgtgcttaaatttaaatacgaaatccattgtaaaatggttgcagaagacaataacggagtccgtacgaatcttgaacagattctcgaatcaatgctcgggaaaagaatggatttgattggcgttccggaagcacaatggggtaaaataagagaagaatttttaaatgatcaccagcaggaaagtgaaggatcaaacgaaccggctgaagaagatccgctgattgcagaggcgaaaaaacttgtcggagcggatttaatcgaaataaaagactaataagatgaaagagagtgattgaatatgcgtggcggaatgggaaacatgcaaaaaatgatgaaacaaatgcaaaaaatgcaaaaggatatggcgaaggctcaggaggaacttgctgaaaaagtgcttgaaggcactgcgggcggcggtatggtgactgtaaaagtcaacggccaaaaagaagttgtagacgttgccattaaagaagaagttgttgatccggaagatatcgaaatgcttcaggacctggttcttgctgcgacaaacgacgccctcaaaaaagtggatgacatgacgaatgagacaatgggacaatttacaaaaggaatgaacataccgggtttattctaggggataaataaacatgcagtatcctgaaccaatatcaaagctgattgacagctttatgaaattgccagggatcggaccgaaaacagcggttcgtctggctttttttgttctaggtatgaaagaagacacagtattggattttgctaaggcgcttgtcaatgcgaagcggaatctgacatattgctcgatttgcggacatattacagatcaggacccttgttatatatgtgaggacacaagaagagataagtctgttatttgtgtcgtgcaggaccctaaggatgtgatcgcgatggagaaaatgaaggaatataacggccagtatcatgttcttcacggcgcgatttcaccaatggacggcatcggtccggaggatattaagattccggagctgctgaaacgtcttcaggatgatcaagtgacagaagttattctcgcaaccaaccctaatattgaaggggaagcaacagcgatgtatatatcaaggctgttaaagccctcaggcatcaagctctcccgtattgcccacggtctgcccgtcggcggtgatttggaatatgctgatgaggtcactctttcaaaagctcttgaaggaagacgtgaattgtaagggaggaaaaggcaaggcatgggttttcttcgcagaaatacattaagaaaagagtttgacgagaagctgatagaacagctctttaaacaaaaagaagaatggaacagacagaagagtctggtcgagaaaagtctagagccctccgctgaggtgttgtttgagctgaaagtcgctgaatctaagtactttttttatttgaaagaagcgaagcagcggaatttgaaaatgagcagatggaagtaagaggtctattctccggaatcttctcataagcttgtactaaacaagcgagggggaagattcatggagccttttttcattatcggtttgattgtcggtctggttgctttgctttttttatggggagtatcttcaaaaccgttaaggtggattggtgtgactgccattaagtttattgccggcgcgattctgttggtgggtgtgaacttgttcgggggcagtctgggtattcatatccctgttaacctgattacaacgggcatcagcggaattcttgggattcccggtatcgcggctttgatagtcattaaacgcttcatcatttaatttgtcgattattgttgacatgttggatcaagggtggtattctaatatacgtcgctgatgacgaaacgaattcttgaaaaagaaattttaaaaagttattgacgacaatgacactgagatgttataataattaagtcgcttcaagagcgatggacaaagttctttgaaaactaaacaagacaaaacgtacctgttaattcaaagttttaaataaatcgcacagcgatgtgcgtagtcagtcaaacactttatcggagagtttgatcctggctcaggacgaacgctggcggcgtgcctaatacatgcaagtcgagcggacagatgggagcttgctccctgatgttagcggcggacgggtgagtaacacgtgggtaacctgcctgtaaggctgggataactccgggaaaccggggctaataccggatggttgtctgaaccgcatggttcagacataaaaggtggcttcggctaccacttacagatggacccgcggcgcattagctagttggtgaggtaacggctcaccaaggcgacgatgcgtagccgacctgagagggtgatcggccacactgggactgagacacggcccagactcctacgggaggcagcagtagggaatcttccgcaatggacgaaagtctgacggagcaacgccgcgtgagtgatgaaggttttcggatcgtaaagctctgttgttagggaagaacaagtgccgttcaaatagggcggcaccttgacggtacctaaccagaaagccacggctaactacgtgccagcagccgcggtaatacgtaggtggcaagcgttgtccggaattattgggcgtaaagggctcgcaggcggtttcttaagtctgatgtgaaagcccccggctcaaccggggagggtcattggaaactggggaacttgagtgcagaagaggagagtggaattccacgtgtagcggtgaaatgcgtagagatgtggaggaacaccagtggcgaaggcgactctctggtctgtaactgacgctgaggagcgaaagcgtggggagcgaacaggattagataccctggtagtccacgccgtaaacgatgagtgctaagtgttagggggtttccgccccttagtgctgcagctaacgcattaagcactccgcctggggagtacggtcgcaagactgaaactcaaaggaattgacgggggcccgcacaagcggtggagcatgtggtttaattcgaagcaacgcgaagaaccttaccaggtcttgacatcctctgacaatcctagagataggacgtccccttcggggcagagtgacaggtggtgcatggttgtcgtcagctcgtgtcgtgagatgttgggttaagtcccgcaacgagcgcaacccttgatcttagttgccagcattcagttgggcactctaaggtgactgccggtgacaaaccggaggaaggtggggatgacgtcaaatcatcatgccccttatgacctgggctacacacgtgctacaatggacagaacaaagggcagcgaaaccgcgaggttaagccaatcccacaaatctgttctcagttcggatcgcagtctgcaactcgactgcgtgaagctggaatcgctagtaatcgcggatcagcatgccgcggtgaatacgttcccgggccttgtacacaccgcccgtcacaccacgagagtttgtaacacccgaagtcggtgaggtaacctttatggagccagccgccgaaggtgggacagatgattggggtgaagtcgtaacaaggtagccgtatcggaaggtgcggctggatcacctcctttctaaggattttaacggaatataagaccttgggtcttataaacagaacgttccctgtcttgtttagttttgaaggaattttgattctttcatatggtagatgggcctgtagctcagctggttagagcgcacgcctgataagcgtgaggtcggtggttcgagtccactcaggcccaccatctttacccaatacggggccttagctcagctgggagagcgcctgctttgcacgcaggaggtcagcggttcgatcccgctaggctccaccaacgtgttctttgaaaactagataacagaagtaattcacattcaattagtaatgcaagatatcacgtagtgattctttttaacggttaagttagaaagggcgcacggtggatgccttggcactaggagccgatgaaggacgggacgaacaccgatatgcttcggggagctgtaagcaagctttgatccggagatttccgaatggggaaacccaccactcgtaatggagtggtatccatatctgaatacataggatatgagaaggcagacccggggaactgaaacatctaagtacccggaggaagagaaagcaaatgcgattccctgagtagcggcgagcgaaacgggaccagcccaaaccaagaggcttgcctcttggggttgtaggacactctgtacggagttacaaaggaacgaggtagatgaagaggtctggaaaggcccgccataggaggtaacagccctgtagtcaaaacttcgttctctcctgagtggatcctgagtacggcggaacacgtgaaattccgtcggaatccgggaggaccatctcccaaggctaaatactccctagtgaccgatagtgaaccagtaccgtgagggaaaggtgaaaagcaccccggaaggggagtgaaagagatcctgaaaccgtgtgcctacaagtagtcagagcccgttaacgggtgatggcgtgccttttgtagaatgaaccggcgagttacgatcccgtgcaaggttaagcagaagatgcggagccgcagcgaaagcgagtctgaatagggcgaattgagtacgtggtcgtagacccgaaaccaggtgatctacccatgtccagggtgaagttcaggtaacactgaatggaggcccgaacccacgcacgttgaaaagtgcggggatgaggtgtgggtaggggtgaaatgccaatcgaacctggagatagctggttctctccgaaatagctttagggctagcctcaaggtaagagtctcggaggtagagcactgattggactagggcccctaccgggttaccgaattcagtcaaactccgaatgccgatgacttatccttgggagtcagactgcgagtgataagatccgtagtcgaaagggaaacagcccagaccgccagctaaggtcccaaagtatacgttaagtggaaaaggatgtggagttgcttagacaaccaggatgttggcttagaagcagccaccatttaaagagtgcgtaatagctcactggtcgagtgactctgcgccgaaaatgtaccggggctaaacgtatcaccgaagctgcggactgttcttcgaacagtggtaggagagcgttctaagggctgtgaagcaagaccggaaggacttgtggagcgcttagaagtgagaatgccggtatgagtagcgaaagaggggtgagaatcccctccaccgaatgcctaaggtttcctgaggaaggctcgtccgctcagggttagtcgggacctaagccgaggccgaaaggcgtaggcgatggataacaggttgatattcctgtaccacctcctcaccatttgagcaatggggggacgcaggaggatagggtaagcgcggtattggatatccgcgtccaagcagttaggctgggaaataggcaaatccgtttcccgtgaaggctgagctgtgatggcgagcgaattatagtagcgaagttcctgattccacactgccaagaaaagcctctagcgaggtgagaggtgcccgtaccgcaaaccgacacaggtaggcgaggagagaatcctaaggtgatcgagagaactctcgttaaggaactcggcaaaatgaccccgtaacttcgggagaaggggtgctctgttagggtgcaagcccgagagagccgcagtgaataggcccaggcgactgtttagcaaaaacacaggtctctgcgaagccgtaaggcgaagtataggggctgacgcctgcccggtgctggaaggttaagaggagcgcttagcgtaagcgaaggtgcgaattgaagccccagtaaacggcggccgtaactataacggtcctaaggtagcgaaattccttgtcgggtaagttccgacccgcacgaaaggcgcaacgatctgggcactgtctcaacgagagactcggtgaaattatagtacctgtgaagatgcaggttacccgcgacaggacggaaagaccccgtggagctttactgcagcctgatattgaatgttggtacagcttgtacaggataggtaggagccttggaaaccggagcgccagcttcggtggaggcatcggtgggatactaccctggctgtattgaccttctaacccgccgcccttatcgggcggggagacagtgtcaggtgggcagtttgactggggcggtcgcctcctaaaaggtaacggaggcgcccaaaggttccctcagaatggttggaaatcattcgcagagtgtaaaggcacaagggagcttgactgcgagacctacaagtcgagcagggacgaaagtcgggcttagtgatccggtggttccgcatggaagggccatcgctcaacggataaaagctaccccggggataacaggcttatctcccccaagagtccacatcgacggggaggtttggcacctcgatgtcggctcatcgcatcctggggctgtagtcggtcccaagggttgggctgttcgcccattaaagcggtacgcgagctgggttcagaacgtcgtgagacagttcggtccctatccgtcgcgggcgcaggaaatttgagaggagctgtccttagtacgagaggaccgggatggacgcaccgctggtgtaccagttgttctgccaagggcatcgctgggtagctatgtgcggacgggataagtgctgaaagcatctaagcatgaagccccctcaagatgagatttcccattccgcaaggaagtaagatccctgaaagatgatcaggttgataggtctgaggtggaagtgtggcgacacatggagctgacagatactaatcgatcgaggacttaaccaatttgaatgtatgcttactgttatctagttttgagagaacactctcaatggtttggtggcgatagcgaagaggtcacacccgttcccatgccgaacacggaagttaagctcttcagcgccgatggtagtcgggggtttccccctgtgagagtaggacgccgccaagctatcattacggtaaaggcagctcatcatgagctgccttttttgtttttgaataaaaacgaaacaaacaccgaaatacgggaacgcccatatactaattgcaaacttcaaaaagatccaaattgtgtatacaatcaacagtttaagggaaggctattcatacggaggtgggcaaaatgaatgaaacgtccggccatgaagaaacatgtattgtgtgtgaaaccaagaaaagcaggggaatccatatttatacgaaatttatatgtttagagtgtgagaagaaagtagtttccactccgacctctgatccgaattatgaatttttcgttcgtaaattgaaaagccttcatacaccgacgttatattcttaaccctgaaaagggtcttttttttgcctgaaatcagaggagttttttcactttttataaaagaactgatacgataagaagaggaacttgtttagacatggaatgtaatagataatactgataaaagtgaataaataggagtcgatcaagtatgaaaccgtttattcaatatatgaaatggacattttgcggcagcacagtttttgtattagcggggataaccttctttacgatagggcaccagccttttctgtattcgcttttatacggggcggccggcggagccgcagtcagtgcgtccggcttgtggaatgcgaagcgtctctttttaaaaaaacaccggctgacaagaaaagaatatgcttatatcaaggaaaatctcgaggaagcaaagggtaaaatcatccgattacgcagggcgcttttccgctctaaaagtatacaaatgctgaagcagaatgcagagatactgcggataacccgacgaatatatctgctcacaaagcaggagccgaagcgtttttatcaggcagagcgtttctattatcaaacgcttgattctgttgtggaactgacggaaaagtatgctttgctctcatcacagccgcgaaaaaataaagatttatcaatgtccttgagtgagacgaggatgactctggcggagctttccagaaggctggaagaagatcttcatgaactgatgaaggaggacatcgacgacctgcactttgaattagatatggcaaagcattcactgagaaaataagaaaggaagaaggaaatggccaaagaccgttccgacgacagtatgggcgcccaaaatgaccagactcatctaaagcttgcagatacgctgccggaagaaaaaagagaagcggcacttcagctcgctgaaaaactggaccctggaaacatgcaaagcattgttctgtttggttcacaggcgcaggcgaatcttctggaattttcccacacgatgatagagcacgtgcaaagaaaagatgcaggagagatgggacagatattggctgatctgatgctgaagcttgaccaggtaaaccccgatgatctgcaggtaaagaacaaagggtttttcgcccggctgtttaaaagggtatccggatctgtgcaggaagtgctttcgaaatatcaaaagacaagtgtgcagattgaccgtatcagcagaaggctggaacattctaaaaatgtgctgttgagtgacaataaatggttagatcagctgtacgtccaaaataaacaatacttttctgatttaactatgtatatagcagcgggtgaattaaaattagatgagctgaaaacaaagcttattcccgaagtggcaagaaaagccgaattacgaaaacacaatcaaatggccgcacaggaagtgaatgatcttcgccagtttgccgaccgtctggataagagggtgcatgatctgctgctgagcaggcagattacgcttcagagtgcgccgcaaatccgtctgattcaaaacacgaatcaggcactggcagagaaaattcagtcctccattgttacggctattcctttatggaagaatcaagtcgccatcgcgctgacgcttatgaggcagcggagtgcggcagatgtgcagaagaaggcggcggatacgacaaatcaattgctgctgaaaaacgccgaacttctgaaaacaagcacagtcgagacggccaaagccaatgagcgcggacttgttgaggcagacaccctcaaaaaagtgcaggaaagcttagtcagcacacttgaagaaatcatgtctattcaagaagaaggcaggatgaaacgcaggcgtgccgaggaggagcttgttatcatggaaggcgatttaaaaaagaagctgcttgatatgagttccggccgggataacggctagatggcaaaaagtcttagctttaagttggctcgcaggcacgatataataagaaagacaggcaaaggatttgtttaaaaatggacacacctttatatacagcgctgatgaagcatgcgcaccgaaatacgtattcttttcatgttccgggacatcacaatggagatgtcttttttgatgaagcgaaatctgtatatcaatctcttttatctattgatatgactgagatcacgggtcttgatgacttgcatcacccgacaggggtcattaaggaagcgcaggatttggtgagcagattgtacggctctcaggaaagcttctttctcgtcaacggaacgaccgccggcaatctggcgatgattttagctgtttgtgaaccgggtgaacccattctgatccagcgtaattgtcacaagtctgttttccatgcggtggcattggccggagccaagccggtttatttggcgccggaaatcgatgaaaatatgcatgtgccggcacatgtatctctttcagtcatcgaaaaagcgctggcgtcatatccgaacgcgaaaggacttgttttgaccaatccgacttattacggacacgccgccgatttgactgcggcagttaaaaaagcccattcatacggtgttcctgtgctggtggatgaggctcatggagctcactttgtgttagggcagcctttcccgccttcatcattggctatgggggcggacgccgttgttcaatcggctcacaaaacgcttccggctatgacgatgggatcttactttcatttaaacagcacccgaattgacagagatcgattaacttattatgtaagcagtttgcaaagcagcagcccgtcatacccgattatggcatctttagatacggcgcgtgcttatgtgcaggatattgctgaaaaagggacacttcccgtccatatggagcacattgagaaaatcaaacgaaggttcgcatcaatttcttctattgaaataatcgagccttccggatatgggctgcgggcggacccgttaaaattaatacttcggtcaaagctcggacattccggctattcattacaacgcattttggagagtgagggcattgttgccgagctggctgacgagtaccaagtattgctcgtactgtcgataggcggccggcggatgatagaacaggcagccgtaagaaacatacagcagaaactggagaatacaccgcccgataaattgccggatgccgtgaattggacatttccgtccatttcgacacttgaatatccgcaaaatgagatgcggaagtttacaaaagagcctgcagatataaataaggcggccgggcgcttgcatgcggggaacattattccttatccgccgggaattccgctgatcatggacggcgaacggataacagaagagatcgtacagaagctttcccgtttaatcggcatggacgcgcatattcaaggcttgttaaacggggaacaattacttgtctatatagaagaggagaaatcatgagcggtttatttataacatttgaaggtcctgaaggtgcagggaaaacgactgtgcttcaggaactgaaagagattctgtcggcagaggggctcccggtgacagcgacaagagaaccgggcggcatcgacattgcggaacagatcagagaagtgatcttaaataaaaacaatacactgatggatgcaaaaacggaggcgctgctttacgccgcggcgagaagacagcatttaaccgaaaaggtgcagcctgcattgaaagaagggcgcattgtgctgtgtgatcgtttcatcgacagttcgctggcttatcaaggctatgcgagagggctcggcattgatgaagttctttctattaaccagtttgcaatcggcgatacgatgcctgatgtcaccatctatttttctattgagcctgaagaagggttgaaacggattacgtcgaatgattcaagagaaaagaatcgtctcgatcttgaggctctgcactttcacacgaaagtacgggaaggataccaaaaggttatgcagcgttttccggaaagattccatacaatcgacgcatcgaaaaagaaggaactcgtcattcaggacgcacttcaagtgataaatgaagcattgaaaaaaattcagttgtgacctgtttctcataagttgctataatgaatgtaacgacaatgttctttccaacctaaagggggcctagagaatgaaattaatagtggcagtggtgcaggatcaggacagcaacaggcttttgaaagtattaaccgaccacaacttcagggtgacgaagcttgcgacaacaggcggattccttaaatcaggcaatacgacgtttatgatcggggtggaagatatccgtgtcgataaagcgctcagcctcattaaagagaatggctgtaaacgtgatcagatgattgccccggtatccccgatgggcgggaatgcggattcctacgttccatatcccgtcgaagtggaagtcggcggagcgacggtctttgtcctcccggtcgatgaatttcatcaattttaaggatttgacgacgtgaaaataaattctgacttacgtacatttattgagaaaaagcagcagcctgcttataaagcggcagagctttccggaacgtttaaaagttcaatggacagccaaagcagcaagctgaaatttgatcagctgagcaggttcttaacggatatagaaacgttcgggaaaaggctgacgaagtcgagaaacttcaaagacttagcgaagttcaaaggattggtaaaacgttttgtaaaagaggccgtagacagcggattatcgcatgagacggagaaaagctttgacttgtacggcagcagccggaccctggggcttgtgaaagaaatagatgaaaaactgcttcagctgacggaagaaatgttagatcaggaaaaaccggcaattgatttgctggatcgaatcggagaaataaaaggtttattgattaacctttacacatagagagtgatacaatggcaatatcatggaaggaaatgaccgggcagcagcccagagtgatgcggcttttgcataacagcattgaaaagaaaaggctttctcacgcatatctgtttgaaggcaaaaaaggtacgggcaaattggatgccgcactgcttctcgcaaaaagctttttttgccttgaagacgggactgagccttgcggagagtgccggaactgtaagcgtatcgaatccggaaaccatcccgacctgcatgtggttcagcccgacggattatccattaaaaaggctcagatccaatcgcttcaggaagagttttccaaaacggggctggaatcgcataaaaagctgtacattatatcccatgcggatcaaatgaccacaaatgcggcaaacagtctgctgaagtttttagaggagccgagtcaagacaccatcgcaattctgattactgagcagctccaccgaatactggataccatcgtttcgagatgtcaggttctcccgttccagccgcttcagccgaaagccatagaagaaagactgattgaacaggaagtgagccctcacatggcccggctcttagcaaatatgacaaataatattgcggaagcagtcgaattaagtcgaaatgatgagtttgcagagtccagagcgaaagtgataaaattgtatgaagtcttacatcagcggaaaggacatgcctttttcttcattcaggatcagtgggtgccctttttcaaagaaaaaacccatcaagaaatgggtcttgatatgctcttattgatataccgtgatgtattatccatccaaattggaaatgaagataaactgatttatcaagacttattccaatcaataaaacagcatgcgctgcaatttacacaacaaagcgttacgaaccaaattctcgctgttttagaagcaaaaaaacggcttcattccaatgtgaatgtgcagggattaatggagcacttggtgttaacgttgcaggagggataagcttgtacaacgtaataggcgtccgctttaaaaaagcggggaaaatttattattttgatccgaatggatttgatatagaacaagacagctgcgtcattgttgaaaccgtaagaggtgtagaatacgggcaggttgtcatcgcaaataaacaagtggacgagcatgatgttgtgcttccgcttcgaaaggttattcgcgttgctgatgaacgcgatcttctcattgtagaagaaaacaaacaggaggccctgtccgcttttgaagtctgtcagaaaaaagtggctgaccacggcttagatatgaagctggttgatgttgaatttacgtttgaccgcaataaagtcattttttactttacggcagacggacgggttgatttcagggaattggtcaaagacttggcttctatctttaaaacgagaatcgaattgcgtcaaatcggggtaagggacgaggcgaaaatgctcggcggtatcggaccatgcgggagaatgctttgctgctccacgttcctcggtgattttgaaccggtgtccatcaaaatggcgaaggatcaaaatttatcgttgaacccaacgaagatttccggtctgtgcggccgtttgatgtgctgtttgaagtatgaaaatgatgagtatgagacggcaaaagaacagctgccggatttaggcgaaatgattacgacggcaaacggccccgcaaaggttgtcggtcttaatattctggaacgggtgcttcaggtggaactgaagaatcgtgaaaaagtgatagaatatacttgggaagagctcttggaagagggcgtcgtatccgcacaaaccacagattaacgaggtgtggaaccttggataaaaaagagttatttgatactgtcataaacctggaggaacaaatcggttcgctgtaccgtcagctgggtgacttaaagcagcatatcggcgaaatgattgaagagaatcaccatcttcagcttgaaaataagcatttgcgtaagcggcttgatgacacgacggagcaaattgagaagttcaaagccgatcagaaagaaacaaaaacacagaaggcagagcagagtgatataggagaagggtacgacaatctggcccggctgtatcaagaaggctttcatatttgcaacgtccattatgggagcgtccgcaagggagattgccttttttgtctgtccttcttaaataaaaaataaggaaaaggcttccgctgatgtcggaagcctttttcaaagagtgccgaaaggaataagattatggtttcattacgtgatgatgaaagattggattacttattagcagaggatatgaaaatagtacagagtccgacggttttcgctttttcattagatgccgtgctgctgtctaagtttgcatacgttccgattcaaaaggggaacattgttgatttatgcacggggaacggcattgtgccgcttttgctcagcacaaggtcaaaagccgatatcaccggagttgaaattcaggaacgcttgtatgatatggcgcttcgaagcgtggaatacaacgggctgggcggtcagatcagtctcattcatgatgatctgaaaaatatgccggaaagactcggacataataaatatgatgttgtcacctgcaatccgccttattttaaaacaccgaaagaggcggagcagaacctgaacgagcatctcagaatcgcaaggcacgaaatcctttgcacgcttgaagatgtgatttccgtcagcagcaaactgctgaagcaaggaggaaaagcggctctcgttcatcggccggggaggcttctggaaatctttgaactaatgaaagcataccgaatagaaccgaaacgggttcagtttatttatccgaaacaaggtaaagaagcgaataccattttggttgaaggaattaaaggcggccgccctgatctcaaaattcttcccccgctctttgtatataatgaacaaaatgaatatacgaaagagatccgcacgattttatatggagacaaatagtcatttcttttatgtgctgctgtgcaatgacaacagtctgtatgccggttatacaaatgatctgcaaaaacggctgaaaacccacaatgagggaaagggcgcgaaatatacaagggcgagaaggccggtttcgttatgccatgcggaatcatttgaaacaaaacgggaagcgatgcaggcggaataccgttttaagcagctgacccgaaagaaaaaagagcaatatatagaagaaaaacgacgcagcaaggaggctgtatatgttaagacgtcagatgagttttaacggaaaatctgaaatgggaactctgtaccttgttcctacaccgatcggcaatttggaggacatgacctttcgtgcagtagagacgctgaaatcggccgatgtcatagctgccgaagatacgagacagacgaaaaagctgtgccatgtttatgacatagaaacatctctcatcagctatcatgaacataataaagaaagcagcggccataaaatcattgaatggctgaaaagcggaaagaatgtggcattggtcagtgatgccggtatgccgacaatttccgacccgggggctgagattgtgagagatttcacccaaatcggcggatatgtcgttccgcttccgggtgcaaatgcggcattaaccgcgctgactgcatcagggatcaccccgcagccgtttttcttctacggattcttaaacagacaaaaaaaagaaaagaagaaagaactcgaaatcctgaaaaaacggcaggaaacgatgatattttacgaagcgccgcacagattaaaagaaacattaacagcaatgcatgacgttttgggtaatcgaaccatcgccgtcacgagggaattaacgaaaaagtatgaggaattcatcagaggaaccatcgccgaggtgcttgaatgggcaaatgaagatcaaatccgcggtgagttttgtctcgttgtcgaaggcaatcaaggcgctgaaccggatgaagaggaaaagccttggtgggcggagctttctgagaaagaacatgtggagcattacataaatgaaggatcttcttccaaacaggccataaaacaaacagcggtagatcgggacgtaccgaaacgcgagatttatgacgcttatcacattcaatcataaaaaaaaccgttcttgtgtcataacaagaacggtttttgtatgaaatagcttatttttggttttgaagctggttttgaatttcagagatgatttgctcagcgccttctttgctgagtaccaatttgccgccggcaagtttaaggttatcatcagaaacttcaccagttacttggcaagtcatgtttggtttatattttttaaggatgattttttcatcatcaacataaatttcaagagcgtctttttctgcgatgcccagtgtacggcgaagttcgatagggataacgacgcgtccaagttcatcaactttacgtacgataccagtagatttcattaacagtctcctcccgagagataattatttgtagtttatatttttcttcgtcattattcgacaaaattccttacattcctagcataacaaggtttccaataatcgtcaatctttttgtttgctattgtttgtaagaattagttcttatagtaagtaaagccttggaaatcctgaaataacaggctttttgactgctttttcgaacctattatcctactgaaaatccttttaaatcaagactttcgaaccaagatgttttatattagtagattatatacgacaaatttcgacatgttaagactttttttaatttcaataaaaatttttaattttatttactcttttacgcgcagtacgtatatatccttgatcttaaaggctaagatggtatcatagatagaggacaaatatcaatattgtatatcaaataaaaccgctctcgtcctttgggcgtgagcttttcgacattctgaatgggaggttgcaacatgccgcaagacaataatactttttatattacgaccccgatatattatccgagcggaaaattacatatcggccatgcttatactaccgtggcaggcgatgcgatggcgcgttacaaaagattaaaaggatttgacgtacgctacttaaccggaacggatgagcacggacagaaaatccagcagaaagcggaggaagagaatatcacgcctcaagcttatgtggatcgcgcagttgctgaaatccaaaagctatggaagcagctcgacatttctcacgatgatttcatccggacgacggaaagccggcacaaagaaattatcgagaaagtgtttcaaaaacttcttgataatggtgacatttacctggatgagtatgagggctggtacagcatccctgatgaaacattctatacggaaacacagctggtggatgtggaacgaaatgagaagggtgaggttgtcggcggaaaaagccctgacagcggccacccggtcgaattaatcaaagaggagtcatacttcttccgcatgagcaaatatgcagaccgcctgctgaagttttatgaggaaaatccttctttcatccagcctgaatcacgcaaaaatgaaatgattaacaacttcattaaaccggggcttgaagatttggccgtttccagaacgacgttcgactggggcgtaaaagtgccgggaaatccgaagcatgtcgtgtatgtatggattgacgcactgttcaactatattacagcgctcggttacgatacggaaaatgatgagctttacaaaaagtactggccggctgacgtccaccttgtcggtaaagaaattgtccgttttcataccatttactggccgattatgctgatggcgcttgatctcccgctgcctaagcaagtattcgcgcatggctggttattgatgaaagacggaaaaatgtcgaaatcaaaaggaaatgtcgttgatccggtaacgttaattgaacgctacggcttggatgaacttcgctattacctgcttcgcgaagtaccgttcggttcagacggtgtctttacgccggaaggtttcgtagaacggattaattatgacttggcgaacgacttaggaaaccttctgaatcgtacagtcgcaatgatccaaaaatattttgacggcgagattggttcatatgaaggaaatgtgaccgattttgattcagagctttcttccgtagccggtgaaacggttaaagcttatgaaaaggcaatggaaaacatggagttttcagtagctttatcaacgctatggcaattaatcagccgtacgaacaaatatattgatgaaactgctccgtgggtgcttgctaaagatcaggaaaaagaaaaagaattacgttctgtcatgtatcatttagctgaatcattgcgtatttcggccgtattgctacagcctttcttgacgcagacgcctgaaaaaatgttttcccagctcggagttgaggatcagtctcttaaagcttgggacagcattcagacattcggccaattgaagaatgtgaaagtgaaaaaaggggaaccgcttttccctcgtcttgaagctgaagaagaagtagcttacatcaagcaaaaaatgcaaggaactgctcctgctaaagaagaaaaggcggaagagccgcaagaagcagagcgtcttcctgaaattacgtttgatcaatttatggatacagaacttcgcgtcgcagaagtcttgtccgcggaaccggtgaaaaaagcagatcggctgctgaaattgcaaattgatctgggctttgaacagcgccaagttgtatcaggtatcgcgaagcattacacaccggatcagcttgtgggaatgaagatcatctgtgtaacgaatttaaaaccggtaaaactgagaggcgagctttctcaaggaatgatactggcgggagaatcggacggcgttctcaaagttgtagctgtcgaccagtcattaccgaaaggcactcgaattaaataataggggcaaaaggtgtttcacgtgtaacattccgtcgaacaccttttgtttttcaacaagaaaggagtttttatgatgctttttgatacacatgcgcacttaaatgccgagcaatttgacacagacttagaggaagtcattgcgcgtgcaaaggctgaaaaagttgaacgaattgtcgttgtcggattcgacaaacccactatcacgcgtgcgatggagctgattgaggaatatgactttatatacgctgcgatcggctggcatccggtagacgcaattgacatgacagaggaagatttatcatggattaaggaactgtcctctcacgaaaaagtcgtggcgatcggagagatgggccttgattaccactgggataaatcaccaaaagacattcagaaagaagtattccggaaacaaatcgctctcgccaaagaagtgaaccttccaattatcattcataatcgtgatgcaacggaagatgttgtcacaattttgaaagaagagggagcggaagaagtcggcggcattatgcactgctttacggggagcacggaggttgcacggcagtgtatggatatgaatttctatatttcattcggcggaccggttaccttcaaaaatgcgaagaaaccaaaagaagtagcaaaggaaattccgaatgaccgtttgctgattgaaacggactgtcctttcctgacaccgcatcctttccgcggcaaacgaaatgagccaagctacgtaaaatatgttgctgaacagctcgctgaattaaaagggctgacatatgaagaaattgcctcaattacaaccgaaaacgcaaaaagacttttccgcatgaactgacagaatgcgctgtcataacgtgtaaaagcttgtccgattcagtggatatgtaaaacggttctacaagcttccttctcctcataagataggttgtcgatatgtctctcttcctttttttgctttgtttttgcataatgagggatacgctgaaggtttttcatcttcgagatgggagggttgacagcattttagatactctatataatctctccgaggagaaggaggcgtttttcatcacacaaaaaatgaaaaaactgttttccgtaaagcttggtaaaagcaaggttattctgattgcagctattattctgctgggcggaaccgggactgcatacggggcacatgagctctcaaaacaatcagtttctgtttccatcaacggcaagaaaaagcaaatacgcactcatgcaaaaacggttggggaacttctggaagatttacatatagagacgagaaatgaagaccggattaccccgtctaagcagacagcattggcagacaacatgaatgtcgtgtatgatgctgcaaagcagatccgtgtgacaagaggcggagaagaaaagactttatggtcaacggcaaaaacagtcggcgcatttctgaacgaacagcatacacctgtgaatcagcacgataaaatagatccagcagcagatacgaaagtgacaaacggcatgaaagtcacggtcgacccggcttttcaggtcactgtaaatgatgcgggaaagaaaaagaaaatatggacgacttcgactacggtcgctgactttttaacgcagcataagatggacatgaaagacgaagataaagtaaaaccggcattacacgaaaagctcacaaaaaatcaggccggcatacaaatcactcgtatcgaaaaagtcaccgatgtagttgaggaaaaaatagcgtatcaagtgaaagaaaaagaagatgcgtctctcgacagcgggaaagaaaagatcgttcaaaaaggaaaagaaggcaaacttaaaaagcattttcatgttgtcaaagaaaatggaaaagaagtatcaagaaagcttgtcaaagaagaaacatctgaaaaaagcaaagatcagatcattgcggtcggcacaaagcggcacagtcccaagattgagcagctcagtgcacctgtgaaggcatcttcgggcgaaaccggatcttccggtaaagtgattaccgtgtcttccacggcttataccgcaagctgcagcggctgttccggccaaacggctacaggcgttaacctgacaagcaatccgaatgccaaagtcattgcggtagacccaagcgtcatcccgctcggcacaagagtccacgtagacggatacggggatgccgtagccgctgatacaggctcagccattaaaggaagacggattgatgtctttttccctgaaaaatcttcagcttaccgctggggaaagaaacaggtcaaaataaaaatcttaaattaattccgattcattcagagggttttgcgccctctgtttttttcgttataataggtaaagtgtattttcagtatattagacgtgacatgcaagcaaaggtttcgttttggatataaaaagtttttttggaggaagtaatgaaaattaaagaaattatagtagtcgagggacgcgatgacactgcgcgcataaaacttgccgttgatgcggatacgatcgagacaaacggttccgcaatcggagacgaagtcatcaggcagattcggctggcgcaggaaacgagaggggtcatcgtgctgacggacccggattttccgggggagaagatccggaaaaccatttctgaagcagtacccggctgtaaacacgcatttctgcccaaacatcttgccaaaccgaaaaacaagcgcggcattggcgttgagcacgcatccattgaaagcatcagagcatgtctggaaaatgtgcatgaagagatggaggcaaagccgagtgaaatttcagctgaagatgtcatacaggccggtctgatcggcggaccggctgccaaaagacggcgcgaacgattgggcgacctgctgaagatcggctatacaaacggcaagcagcttcaaaaacggctgcaaatgtttcaaatcaaaagaagtgattttattgatgcgctcgatgctatgaggcaggaggaacaggatgaacaataaagatatcgcgacacctatcagaacgaaggaaattctgaaaaagtacggtttctcttttaaaaagagtctgggacagaatttcttaattgatacaaatatattggacagaattgtggaccatgcggaaattacggatcggaccggagtcattgaaatcgggcccggaatcggcgcgttgacagagcagcttgccaaacgggcgaaaaaggtcgtcgcgtttgaaattgatcagcgtctgctgcccattctcaatgatacgctgtctccgtatgacaatgtaacgatcattcatcaagatgtgctgaaagcagacgtcaaatccgtcattgaagagcagtttcaggattgtgatgaaattatggtgacggcgaatctcccatattatgtgacgacgccgatcatcatgaagcttttggaagaacatcttccgttaaaaggaattgtcgtaatgctgcaaaaagaggtcgctgagcggatggccgctgatccttcctctaaggagtacggatcgctttccattgcggttcagttctatacggaggccaaaaccgtcatgaccgtaccgaaaacggtgtttgtgcctcagcctaatgtcgattccgccgtcatccgtctcttgcttcgtgacggcccggcggttgacgtcgataatgaaccgtttttcttccagctgattaaagcaagcttcgcacagcgccggaaaaccttgctgaacaaccttgtgaacaatcttccgggcggaaaagagaaaaaagctcaaattgaagaagttcttcaagaaacgaatattgatggaaagcgacgcggtgaatccctgtccatagaagaattcgcgctcttgtccaacggattgcataaagcccttttctaagagggctttttgttttgcgtcaccacttggactgccgctacataggctagaggagaaccttattcattcaactgcaagaaaagcttgaaacatcaagcgccgcagcggaaagaggtgcatttgccaagacttctttcatgatgaggcttagtctatttgtggagtgggtaacgtgcaatttcaaataggagatatggtagccaggaaatcctatcaaatggatgttttatttcgcattatcggtatagagcaaacaagcaacggaaattcaattgccatcctgcatggtgacgaagtcagattgattgcggatgctgatttttctgatttggagcctgtcagaaaagacgaacaggccatgagaaagaaaagagatgaaagcaggatgaatgaatctctcgagctgctccgccaggattataagctgcttcgggaaaaacaggagtattacgcgacaaatcaatatcagcatcaggagcactactttcatatgcccggaaaggtattgcatctggacggcgatgaggcctatttgaaaaagtgcctgaacttttatgaaaaaatcggtgtgccggtatacggaattcattgccatgagaaaaaaatgccggcgtcaattgacgagctgcttgataaatacaggccggatattttagtcatcaccggccatgatgcatattccaagcataagggaggcgtgaacgatttaagcgcctacaggcattccaaacactttgtcgaaaccgttcagagagcgaggcgtaaagtccctcatttggatcagctggtcatattcgcgggggcgtgccaatctcattttgagtctttaatcagagcgggcgcgaatttcgcaagttcgccgtcacgcgtcaatattcatgcgcttgacccggtatatattgtcgcgaaaatcagcttcactccgtttatggagcggatcaatgtatgggatgtcctgagaaatacgctgacgagagagaaagggctgggaggaattgaaacgaagggtgtgctgcgtgtcggtatgccgtataaatcaaatggatgagtgataaaacccgcatatatttcgctatgcgggttaattattttacatattgatacataaatttccggaacttgtgaaaaataacgcagaaatcaatagaattttgtcaaaataattttgttgacaatgacttattaacgttgatataatttaaattttatttgacaaaattgggctcttgttgtacaataaatgtagtgaggtggatgcaatggcgaagacgttgtccgatataaaaagatcgcttgatgggaatttaggtaaacggcttacgttaaaagcaaacggcggccgccgaaaaacgattgagcgttcgggcattttagctgagacgtacccttctgtttttgtgatacaactagatcaagacgagaattcgtttgaaagagtttcatacagttatgctgatattctgactgagactgttgaattgacattcaatgacgatgcggcaagctcagtagcattttaatgggcagtgaaccttttgtttactgctttttgttttgccttctaaagctcttctaattattccctcgaaagtttcagccgattaaacggaagctataggtgtcacatgttttatcgtggcgtgcacgaatggtgatcaattctataaaaggggttgtttcgtttgggcagacgtcgtggagttatgtcagatgagttcaaatatgagctggcgaaggaccttggtttttacgatacggtgaaaaacgagggctggggaggcattcgggcgcgtgacgccgggaatatggtaaagcgcgcgatcgagattgccgaacagcagatggcggctcagaaccaaaataaccgataatgcagtggcccgggggacaatccgttccccggttttttctatcggctgtcaaaaccggcgtcaatttcggataagtacctccgggtctccaaatgtgatacaatgttcatacttatgtttagatggagaagtaggtgaaagctatgcgtattttagaaaaagcgccggccaaaatcaatctgtccctcgatgtgacgagtaaacgcccggatggttatcacgaagtggagatgatcatgacgacaattgatttggcagatcggattgaactgacagaactgcccgaaaacgttatcagagtggcgtcgcataatcgctttgttccggatgatcaaaggaatctggcttatcaggcagccaaactgcttaaagaacggtttcaagttaaaaaaggcgtttcgattatgattacaaaggtgatccctgtagcggcagggcttgccggcggaagcagcgatgcggcagctacgctcagagggctgaacaggctttgggatttaaagctttctgtcgaagagcttgcagagcttggagctgaaatcggttcagacgtgtccttctgtgtatacggaggcactgccctggcaaccggacgcggtgagaagatcaggcacatcagtgctccgcctcattgctgggtcatgctcgccaaaccgacgatcggggtatcgactgccgaagtgtaccgccggctgaacttacagcaggttcggcatcctgatgtgcaggcgatgattgacgcgattgaagaaaaaagcttccaaaaggtatgcggacaattaggaaacgtattggagtcggttacgctcagcctccatcccgaggtggcgatgattaaaaatcaaatgaaacgcttcggcgctgatgcggtgttaatgagcggaagcggaccgactgtattcggtttggttcaatacgaatcaaaggtgcagcggatttataacgggttaagaggtttctgtgatcaagtgtacgcggtgcggatgatcggcgaacagaatgctcttgattaaatccgtatgttaagttatattatttttaaattattcggattttgggggtaagttcatgaagtttcgtcgcagcggcagattggtggacttaacaaattatttgttaacccatccgcatgaattaataccgttaacgtttttctcagaacggtatcaatcagcaaagtcatcaatcagtgaagatttaacgattattaaacagacctttgaacagcaaggcattgggacgctgcttacagtgccgggagctgccggaggcgtcaaatacattccgaaagtgaaacaggctgaagcagaagcgtttatacaggagctgggacagtctttagtaaatcctgagcgtatccttccgggcggttatgtatatttaacggatatcttaggaaaaccatctgtcctctctcatgtaggcaggctttttgcttccgtttttgcggagcgggagattgatgtggtgatgaccgttgcgacaaaaggaatccctcttgcttacgcagcggccagttatctgaacgttccggttgtcatcgtacgaaaggacaataaagtgactgaaggctccacggtgagcatcaattatgtatcaggatcgtctaaccgcattcaaacaatgtcgcttgcgaaaagaagtttggctacgggttcgaacgttttgattattgacgactttatgaaagccggcggcaccattaacggcatgatcagcctgcttgatgagtttaatgcaaacgtcgcggggataggcgtcttggttgaagccgagggagtgaatgaacggcttgtcgatgaatacatgtcactgctcacgctttcaaccatcaatatgaaagacaaaacgattgagattcaaaacggcaattttctgcgattttttaaagaacagcatttaaagaatggggagacagaaaaatgactaaagcaatccatacgaaacacgcgccggcagcgatcgggccatattcacagggaatcatcgtaaacaacatgttttacagctcaggccagattcctcttactgctgaaggagaaatggtaaacggtgatatcacagaacaaacgcatcaggtgttcagcaatttaaaagctgtgctgaaagaagcgggcgcttctctcgagacggttgtcaaagcaacggtatttattgctgatatggagcagtttgcggaagtgaatgaagtgtacggacaatactttgatgtacataagccggcaaggtcttgtgtggaagtggcgagactgccgaaagacgctctcgtggaaattgaagtcattgcgctggtaaaatcttaaatctcagaaaagtggttccggtctccgggatcactttttttatgcagtatatgatccccaaatatggtttatcacctaattgtgtatgtatatcctatattttcaaaaaaactttttgaaacgtgcaggaatttaaaaagaatcgtggaattgttagactaatgcttttatatagggaaaaggtggtgaactactgtggaagttactgacgtaagattacgccgcgtgaataccgatggtcgcatgagagcgattgcatccatcacgctggatcacgaatttgtcgtacatgatattcgtgtgattgatggaaacaatggtcttttcgttgcgatgccgagtaaacgcacccctgatggagaattccgcgatattgctcatcctattaattccagcacgcggggcaagatccaggatgctgttttaaatgagtatcatcgtttgggtgattctgaagcattagaatatgaagaagccggggcttcttaaacataacaaaatgtaaggactgctgataaaggctgacacaaggccttttccggcagtccttttttaaatctgatttttcagtaataaagcgattacatagaaaattcttgcactttttgatgtcttcttgaaatcaacagctatttaggatatatttttctatggataaaagggatattggaggccattaaatggataagcggtttgcagtgattttagctgccggaaaaggaacgagaatgaaatcgaagctttataaggtccttcatccggtatgcggaaagcctatggtagagcacgtcgcagacgaagctctgaaattatctttagcgaagcttgtcaccatcgtaggacacggcgccgaagatgtgaagaagcagctcggacagaaaagcgattacgctctccaagcagaacagctcggtacggctcatgcggtcaagcaggcaaaaccatttcttcacggagaaaagggtgtcacgatcgttatttgcggcgatacaccgcttctgacggcggagacgatggaagccatgctgaatgaacatacagacaaaggtgcaaaagccacggtgttaacggccgttgccgacgatcccgccggatacggaagaatcatccgcagtgaagacggcgccgttcaaaaaatcgtggagcacaaggatgcttcggagcaagaacgtcttgtgaaagaaatcaacacgggaacgtactgttttgataacgaggctctttttcgtgtcatcgaacaggtttcgaatgaaaatgcccaaggcgagtattatctgccggatgtgatcgaaatcctcaaagacgaaggcgaaactgttgccgcttaccagactggtaacttccaagagacgctcggagtgaatgatagagtcgctctttctcaggctgaaatgtatatgaaagagcgtattaacaaacggcatatgcagaacggagtcactttaatcgatccgatgaatacgtacatctcacctgacgcgcgtatcggacaagatacagttatttatcccggaactgtgttaaagggacaagctgaaatcggcgatgaatgtgtcatcggccctcacactgagatagaggacagttcaatcggcagccgcactgtgattaaacaatccgttgtcaaccgcagcaaagttgggaatgatgtaaatatcggtccttttgctcacatcagacccgattccgcaatcggcaatgaagtgaagatcggaaactttgttgaaatcaagaaaacacaattcggcgaccgaagcaaagcatctcatttaagctatatcggtgatgccgaagtgggcacggatgtgaatctgggctgcggctccatcacggtcaattatgatgggaagaaaaaatatttaaccaagattgaagacggcgcttttataggctgcaactccaatctggtcgctcctgtcacagtgggagaaggcgcgtatgtcgctgcgggttcaaccgtaactgaagatgtgccgggcgaagcgcttgccattgccagagcaagacaagtaaataaagaagattatgtgaaaaatattcataaaaaataatcctaaaatcggaggtttaccatgtctaacgaatacggagataagaatttaaagattttttctttgaattcaaatccagaacttgcaaaagaaatcgcggataatgtaggggttcaattaggaaagtgctctgttacaagattcagtgacggagaggtccagatcaacatagaagaaagtattcgcggctgtgattgctatatcattcagtctacaagtgcgccggttaatgagcacattatggaattgctgattatggttgacgctctaaagcgcgcttccgcgaaaacaatcaacattgtgattccgtactacggttatgcgcgccaggacagaaaagcaagatcacgtgaaccgattacggcaaaactttttgcaaacctgcttgaaacagcgggtgcgacacgcgtgattgcgcttgatttacacgcgccgcaaattcaaggtttctttgatattccgattgaccacttaatgggtgttccgattttaggccattactttgaaggtaaagacttgaaagatatcgttattgtttctcctgaccacggcggtgtgacgcgcgcccgcaaacttgcggaccgtctgaaagcgccgatcgcgattatcgacaaacgccgtcctagaccgaatgaggtagaagtgatgaacatcgtcggtaacgtggaaggaaaaacagcgattctgatcgatgatattattgatacggccggcacaatcacacttgccgctaacgcgctggttgaaaacggagctgcagaagtgtatgcatgctgtacgcaccctgtattgtcaggccctgccgttgagcggatcaataactctaaaatcaaggagcttgtcgtaacgaacagcattaagcttcctgatgagaaaaaaatcgaccgctttaagcagctttctgtcggaccgcttctggctgaagcgattatccgcgttcacgagaaacaatctgtcagctatttattcagctaaaccgaaactttaaggtttaaatcccagttattgtgggtattgttctaataggacgataaaacgataattaggatggtgctgaatatggcaactttaaaagcaaatgaaagaacagattttaaacgttcgacgcttcggaaaatccgtcattcaggacatgttccagggattatatacggtaaagaaataacgaatacgcctgtctctttagacagtgtcgaattgcttaaaacattgcgggacgaaggaaaaaacacgattatcacaattgatgtcaacggaaatcagcaatcggttatggtgactgatcttcagacagacccgctcaaaaacgaattgacgcacgccgattttcaagtcgtgaatatgagtgaggagctcgaggccgaggtgccgattcagctgacgggagaggcgaaaggagtcaaagacggaggcgttatccagcagccgctgcatgagctttcgatcaaggctaagccgaaggacatccctcagacaattaatgttgatatttccgggcttgaaatgaatgatgtgctgaccatcgcagatctgactgctgacggcaattatacatttacaaacgacccggaagaagtcgtggcttccatccttcctcctaagcaggaagcattcgaagaagatgcagaaccgtctcctgaggaagagcccgaaggagaaaatcaataagcgctttaagacgtaacccgcccgaggttacgtcttttgtgctagaatgagaagaattacagcgatgttgagggaggatttacgatgcttgtgattgccggtctcggtaacccgggaaaaacctatgagaacacgaggcataatgtcggctttatggccattgacgagctttctaaagaatggaatattgaactgaataaaacgaaattcaacggactttacggaatggggtttgtttccggaaaaaaagttctacttgttaaaccgcttacatatatgaatttatcaggagaatgtttgcggccgctgctggattattatgatgccgatcatgaagatctgaaagtcatatacgatgaccttgatcttccgacgggaaaaatcaggcttcggacgaaggggagcgcagggggacataacggaattaaatcgcttatacagcacctcggaacccctgaatttgaccgggtcagaatcggaatcggccgccccgttaacggaatgaaagtcgttgactatgtactgggagcttttacgaaggaagaagcgccgcatatcaatgatgccgtctcaaaaaccgtaaaagcctgcgaagcttccttaacgaaaccatttttagaagtcatgaacgaatttaatgcaaatgtataagataaataatgggagaccatactagggaaaaatgattttttcacatcaggaggtccaacgtatggctttgcattatttctgccgccactgcggctttaaggtagggagcctggaatattcaacggtgccgacacagtcacttggatttcagcacttaacaaatgaggaaagaaacgatatgatttcatataaagacaatggagatgtccatgttcttacaatttgtgaagactgccaagaggcgctggaacgcaatccgcactaccatgaacacaacacatttattcaataagaagctttggtgtagattctagaccaaagcgtttttctgttcttgcagaaaatagagaggagggcccatatggacaacattcaaacctttattaaagaaagcgatgattttaaatccattgtcaacggtttacatgaggggctgaaggaacagctgcttgcgggtctgtcaggttccgcgcgttctgtttttacctccgcccttgcacaggaaacgaaaaggccgattttctttatcacccataatttatatcaggcccaaaaagtgacggaagatctgacggcgcttctcggggatcaatctgtttttttataccccgtgaatgaattgatttcttcagaaattgcggtagcgagtcctgaactgcgcgctcagcggcttgatgtcattaatagattaacaaacggagaagcgccggtcgttgtggcgcccgttgcggcagtgagaagaatgcttccgccgaaggagctgtggaaaagcagccagctcgtcatttcactcggagacgatatagaaccggatcagctgtccgcgcgccttgtagaggtggggtatgagcgttccgatatggtttctgcacccggtgaattcagtattcgcggcggaattatcgacatttatccgctgacgtcggagcatccggtgcgaattgaactgtttgatacggaggtcgattccatcagaagcttcaattctgatgaccagagatcaatcgagacgctcaaacatgtggcgatcggaccggcgaaggaattgatcatcagggcggaagaaaaagcccgggcaatggaaaggctcgataaagggcttgccgacagtctgaaaaagctgaagcaggacaaacaaaaggaaatgcttcatatcaatatctcacatgataaagaacggttatcaacgggacagactgatcaggaacttgtgaagtatctctcgtacttttacgaaaaacctgctagtttgctagattatacaccggcagacacgttgttattgttagacgaggtcagccgcattcatgaaatggaggatcagctgcaaaaagaagaggccgaatttacgacaagtctgctcgaggaagggaaaattctgcatgacattcatttatccttcagctttcaggagcttatgagcgaaaagcggcgcccggctatttattattcattatttttgcgtcatgtccagcatacaagccctcagaatatcgtgaatgtgacaagccggcagatgcagagttttcacgggcagatgaatgtcctctcaggtgaaatggagcgctttaagaaatcaaacttcaccgtcgtctttttaggcgcaaataaggacagaaccgacagattggcatccgtgctggctgattacgaaattgaagccgcgaaaacggacagctccaaagcgcttgtgcaaggacaggtctatgtcatggaaggcgagctgcaatccggttttgaactgccgctgatgaagctggccgtcattacggaggaagagctgttcaaaaaccgaatcaagaaaaagccgagaaagcagaagctgacaaatgccgaacggatcaaaagctattccgagcttcaggtcggtgactatgtcgtccacgtcaaccacgggatcggtaagtacttggggatcgaaacactggaaatcaaaggcattcataaagattacctcaacattcattatcagggcagcgataagctgtatgtccctgtagaacaaatcgatcaggtgcagaagtatgtcggctctgaaggaaaagaaccgaagctttataaactgggcggcagtgaatggaaacgggtgaagaaaaaagttgaaaactccgttcaggatattgccgatgatctgattaagctttatgcggaacgggaagcaagcaaaggctatgcgttctcgcccgatcatgaaatgcagcggcagttcgaatctgctttcccttaccaggaaacagaggaccagctccgttccattcaggagattaaaaaggatatggaaagagaacgcccgatggaccgtttgctttgcggcgatgtgggttacgggaagacggaggtagccatccgagcggcctttaaagcgatcgcagacggaaagcaggtcgcgcttcttgtgccgacgacaatactcgcgcagcagcattatgaaaccattacggagcgttttcaggactatccgattaacatcggtcttctcagccgattcagaacgagaaaagaatccaatgaaacgattaaaggactgaaaaacggaacggtagacatcgtaatcggaacccacaggctcttatctaaagacgtcgtctataaagatctcggcttgctcatcattgatgaagagcagcgcttcggcgtaacgcataaggaaaaaatcaaacagatcaaagccaatgtcgatgtactgactcttacagcgacgccgattccgcgtacgcttcatatgtccatgctcggtgtgcgggatttatccgttattgaaacgccgccggaaaaccgtttccctgttcagacatatgtcgtggaatacaacggcgcgcttgtacgagaagctatcgaaagagaactggcgcgcggaggacaggtatatttcctgtacaaccgcgtggatgacatcgagcggaaggctgatgaaatttccatgcttgttcccgatgcaaaagtggcatatgcccacggaaaaatgaccgaaaatgaattggaaagcgtcatgctcaattttctggaaggggaatcagacgtccttgtcagcacgactattattgagacaggcgtagatataccaaatgtcaataccttgattgtgttcgacggagacaaaatggggctgtctcagctgtatcagctgagaggacgggtcggccgttccaaccgcgtcgcttacgcttattttacgtaccgcagagacaaagtgcttactgaggtggcggaaaaacggctgcaggcgattaaagaatttaccgagctgggatcaggctttaaaatcgccatgcgtgacttgacgatcaggggagcggggaaccttctcggcgcccagcagcacggctttatcgactcagtcggttttgacctgtactcgcaaatgctcaaggaagcgattgaagagcggaaaggcgatattccgaaaagcgaacagtttgagacagaaatcgatatcgagcttgacgcgtatattcctgaaaactatatacaagacggcaagcaaaaaatcgacatgtataaacgcttcagatcaatcgccacaattgaggagaaaaatgagctccaagatgaaatcatcgacaggttcggcagctatcctaaagaagttgaatggctgtttacggttgctgagatgaaggtatacggaaaatatgaacgcgtcgaactcatcaagcaggataaagacgcgatcagatttaccatttctgaagaggccagcgcacagattgacggccagaaattattcgaactcggcaataaatacggccggcagatcggactgggaatggaagggaaaaagctgaaaatctcagtacagacgaaaggccgcaaaacggaagagtggctggagaccgtgctcggcatgctgaaaggccttcagaatgtgaagaaagaaacaatcgcgtcttcataaaaattgttactctctggtgtatattacatttgatgtgacggatactaatttcaagcgagtggcggaagctacataaagtaaagagctttagtactttcccttaaatatcatcacatgaaagagaggcaccagagagatgaaagctacaggtatcgtacgtcgtattgatgatctaggacgggtcgtcattcctaaagaaattcggagaacactgcgaatcagggaaggagacccgcttgaaatattcgttgaccgcgacggagaagttatattgaaaaaatattctcctatcagtgagcttggcgattttgcgaaagaatatgcagatgcattgtatgacagtctcggccattccgtcttgatttgcgaccgtgacgcgtatattgccgtttcgggcagttcgaaaaaagaatttctgaataaagccatcagcgatttgctcgaaaaaacgatggatcagcgcagctcagtggtagaaaacgacgtgaagtccgcgcagcttgtgaatgacattgatgaagatatgagctcctatacaatcgctccgatcgtggcaaatggcgatcctatcggtgccgtggtcatcttttccaaggaacaggcgcttggagaagtagaacataaagcggtagaaacggcagccagttttttggcgagacaaatggagcagtaggtcttattaccattattgaaataagaaaacggggaaagaacagctcttatacaagtgctgttctttttcatattcatatgtgctctctatcggttcggccgttaggattgtgatataataagctcgttttatagacgtaattttctagcggctggaaggagcttttggatgaacgattcagttggcgccaagcggcaatcggcatggaaaggtgcttttgtgctcgtcgttgcgggcatcgtgacgaagatattaagcgccgtgtacagggttccttttcagaatattgtcggtgacgtcggattttacatttatcagcaggtgtatccgtttttagggatcgcggtcatgctgtcaacatccggttttccggtgatcatctcaaaattaatgaacgattatagcgatcataaacaaaaaataatgaaaatttccgccctttatgtcacggcggccggacttgttctgtttgcgctcatgtatgccggcgcggcgccgttggccggttttatgggtgatgcccgccttgtgatgctgataagggtcgcggcgttcgctttcatactgtttccgtttacggcggttttccgggggtatttccaaggcgtgcatgatatgatgccgtcagccttatcccagattacggaacagcttcttcgggtggcggtgcttctcggtttatccttctggcttttgaaaagcgggcgttcattatacgcggcgggtgcgggggcggcctcgggatcaattgccgggagctttgcggccctttgtgtattggctgttttctggtataagcgggaagaaacaaagaaagacggcggacatatcgaaacggccgtcattgtaaaaaagctgctgctttattcagtcaccatctgtatcagcagtgtactcatgcttttgattcagcttgtagacgccttaaacttatattcactgctttcagacgggacggagagccatgccgcgaaacagctgaaaggcatatatgaccgcggacagccgctccttcagctgggaaccgtgtttgccgtcagtatcgccgcgtccttggttccttcaatttcaaaagcggtgcatgagaacaagccgtttatcataaaagagaaagcgtcatctgccgtcaagctctgccttgcggtagggatcggtgcatcagccgggcttttttgcattttagaaccggtgaatatcatgcttttccaaaacagtgaggggacgccgaccttacaaatattcagcttatctatcttttttgcctcgattgcgcttacggcagccgcaattctgcaaggagcgggacataccgttttccccgccgtatccgttttggcgggaggggcgctgaaatgggtgctgaatgtttggctggtccccggctggggtattacaggagcggcactggcgaccgtcttggcatttgccgcagttgcgtgcctgaatctccggagaatttggtcgaagggatggctgacgaatatcggaggcgtgattgcccgtctgtgctggtgcagtctgctgatggtcttctttttggtcgtatacatgaagctttggcagttatttgttcctgtcagcagggcggagctgtatgtgagagtctgtctgcgtcaatcatcggagggctattgtttatttattgtatgataagaatgaagattttcacggacgaagagctgagcggtcttcctttcggcagtgctttaagcaaattgaaaaagaggagagaaaaacatggcaggtaatattacggtcgtcggcctcggcgccggagacatggatcagttgacagtgggcgtacataagctgctgactcaggcgaagcatttatatataagaacgaaagaccaccctttgatttcggaattagagcaagagacggaagcggacatccggtattttgatgatatttatgaaaaacatgatcagtttgaagcggtctatgaagagatcgcggacattctgtttgaaaaagcgaagcaagaggatgtcgtctacgctgtacccgggcatccgtttgtcgctgagaaaaccgttcagctgttatttgaacgccgggaagaacaacagatagatgttcataccgctggagggcaaagctttctggatgccacttttaatgcgttgcgaattgatccgattgaagggtttcaatttacggatgcgcaaacaatgacgccggatgagctcgaactccggcatcacctgatcatctgccaggtttatgaccaaatgacggcctctgaggtgaagctgacgctcatggagaaattgcctgacgactatgaagtggtcatcgttacagcagccgggagcaagggagaaaagatgatcaaggtgcctttgtttgaacttgaccgcaatgtagaaataaataacttaacaagcgtgtatgttccgccgattaaaaaagaagaactcctttaccaggaattttctgcattccgaagtattattcgcgagcttcgcgggccgaacggctgtccgtgggatcaaaagcagacacaccagtcattaaagaaatatatgattgaggaatgctacgaactgcttgaggccattgacgaagaggacacggatcacatgatagaagaactcggggacgtcatgcttcaggttatgctgcacgcccagatcggagaagacgaggggtatttctcaattgatgatgtcatcagagacatcagtgcgaagatggtcagacggcacccgcatgtgtttaaggatgttaaggttcaggatgaacatgatgtcgtcgccaactgggaagaaatcaaaaaggcggaaaagcaaacaacatcctcttcattgctggatgccgtgccgaaaacactgccttctcttgcgaaagccgccaagcttcagaaaaaagccgcaaaaaccggctttgactgggataacgttcaggacatatgggataaagtaaatgaagagctgaaggaattttctgcagaggcttccgccgaatcagcagatgaaatcagcttaaaagctgaattcggcgatgttttatttgcattggtcaatatcggccgatactataaaattgagcctgaggaagcgctcgccatgacaaatgacaaattccgcagacgctttgcttatattgagaaagaagcggcagcaaagggccttgaattgaccgcaatgtcacttgaggaaatggacaaattgtgggatgaagcaaaagaaatggagaggagattctgatatgagacttgataaatttttaaaagtatccagattaattaagcgacgcacattggcgaaagaggtcgccgatcaagggagaatcaccgttaacgggaatcaggcgaaagccagctcagacgtaaaagccggtgatgaactgaaggtccgcttcgggcagaagcttgtcaccgtgaaggtaaatgaattgaaagaaacaacgaaaaaagaagaagccgcgggcatgtatacaatcgtcaaagaagaaaaactcggcgaataggcttgttctaaacaaggctcccgcctcatacaatgcagtaataatgctaaaagtatcgaggatatgggggctgaatagatgaattcatattatgagcaaaaaggttcttcttctgttccggaacagcatgatgtaacgatgaaagggagaaagcatttagacatttcgggcgtcaagcatgtggaaagttttgataacgaagagtttttgctggaaacggttatgggaatgctttccgtcagaggcgagaatctgcagatgaaaaaccttgatgtggaaaaagggattgtatctataaaaggcagggtgtttgaccttgtatatttagacgagcagcaaggggataaagctaaagggttttttagcaagttgtttaaatgacgctgacgacccaattttatacgatgctggcaatgaccggtatgggcgcctggctcggagcgtcgcttgatacatacaggctgtttgtcagccgcgccaaaacggccagatggctgttattcattcatgacattctcttttggattgtacaaggtctgctgtttttctatgtgctgctcaacgtgaatgaaggggaactcagggtatacattttcttggctgtcttactgggtattgcgacgtaccaaagcctgtttaaacgaatgtatataaaaatactgaaatttgccattcatcttgcggtgtctctttaccaattcgcaaaaaagctcattcagcacgtgctgttccgtccggtgcttctgctctttaagctgctcatcgggctgatcacggttatttctttatactcctatcgggtgagtgccttttttgcgaagtgtctttttaagatcgtagcgtttttgctgtatccgctgtttttcctgttgaaacaattattgaaacttcttcctgaaaagtggcgtcttactttcaaacgatattttcaaaaaagtgcaggatttttacaaaagagcaagaaactaatcataacaatcagatcgaccatgatacgtattttgaaaaggtgaaaggaggaccgtctggtttgaatctatctagggaacgtacaataactgaaattcaaaacgactataaagagcaggttgaacggcaatcccagcttatgaaaagaaggcggaaagggcttttcagacggttgatcgtattcggcgcccttgtgttgttgacggctattgtcttagcgggttctctgtggtcacagacctcttcccttagcgcaaacgaagaaaaaaaggctcagctggaaaaacaagttaaagaattgaatgcgaaacaggctgatttaaaagatgaaatttccaaattaaaggatgaggattacgtcacagagcttgccagaagagacttgtttatgtcaggaaatggtgagattctctttaatgtagaaaagaagagcaagtagccttgttgacacttaaatttttatttaggtataattaaacaaacgatctttttataagcctaaggaggagcactttttttatgtcgattgaagttggcagcaagttgcaagggaaaataacaggtattacaaatttcggagcatttgttgaattgcctggaggctcaaccggtctcgttcatatcagtgaggtagccgataattatgtaaaagacattaacgagcatttaaaagtcggcgatcaagttgaagtgaaagtcatcaacgttgaaaaagacgggaaaattggtttatcaattaaaaaagctaaagaccgtccgcaagccagacctagaaatgatttccgtccgaaagaatcttttgaacagaaaatgaacaagtttcttaaagatagcgaagaccgcttatcatctttaaaacgaaacacggaatcaaaacgtggagggcgcggagcaagaagaggataacttgctgctttctataaatacatggagcatccgtctatcccagcgggtgctttttttgtatacgcgcatgtagtcagaaaattaaaactttaaagtttctgttgacggaatgaagaaacctttgtattatataacttgtgcttataagcacctatatggcggtgtagctcagctggctagagcgtacggttcatacccgtgaggtcgggggttcgatcccctccgccgctaccatatatatctggcccgttggtcaagcggttaagacaccgccctttcacggcggtaacacgggttcgaatcccgtacgggtcatcaagcgaatcggcttctgttgcagaagccgattttttcatatttagacaactttttgagaaatgtcggaggaaatacaaaaggaaaggggaacaagggagaaagcgtcgaagagttctttggaattgttaccttcttttgacaaaatcctatctgggctttcatttataatgacaagcaacgaataaaacaggtgggggatgagagcaatggaaaaagcggaaagaagagtgaacgggccgatggcgggacaagctctggaaaaactgcaatcgttttttgaaaaggcggcaaagcttacagtccatcaagcgcattcactttttttctataagggtttcatttatgtcgtgatcggttttttacttggacgggctttcatattatctgaggttcttccatttgcactgccgtttttcggagcgatgcttttgatcagaagagataaagccttctatgcttgtctgtctttacttgcgggcgctttaaccatttcgccgaaacactctttattgattctcacagctttggccgtcttcactctattttcaaaaatcggtacatatatcgtgcaggaccgggtgaagatgctgccgatcgtggtgtttttctctatggctgccgcgagaatcggatttgtttattttgaaagcggcgcttttaccacctatgattatgtgatggctgttgtcgaggcgggcctggcctttattttgacgctgatctttttacaaagcctgccgattttcacgatcaaaaaagtgaagcaatcgttaaaaatagaagaaatcatctgttttatgatcttgatcgcatccgttttaaccgggcttgccggtgtttcatttcagggaatgcaggctgaacatatcctggcccgctatgtcgtgctgagtttttcctttgtcggcggggcaagcatcggctgtacggtcggtgttgtgaccggactgatcctcgggcttgcgaatatcgggaatctctatcaaatgagtctgcttgcgttttccgggcttcttggcgggctgctgaaagaaggaaagaaagccggcgccgcagtcggattggtgatcggctcactgctgatttcattatatggtgaagggtctgccggattaatgaccactctttatgaatctttgattgccgttgtattgtttttgattacgccccaatcgattacgaaaaaggtggcgcgatacataccgggcactgctgagcacagtcaggagcagcagcagtacgcgaggaaaatcagagatgtcaccgcccagaaagtagaccagttctccaatgtgtttcatgccttgtcggagagcttcgccacctttcatcagacgtcttccgatgagcaggcggaagaaggggaagtggatctctttttaagcaaaatcaccgagcattcctgccaatcctgctataaaaaaagcaaatgctgggttcaaaactttgataaaacatatgacttaatgaaacaagttatgcatgaaacagaagaaaagcagtatgcctcaaaccgcagattgaaaaaagagtttcaacagcactgttccaaatccagacaggtggaagagctgattgaggacgaacttgcccaccatcacgcccatctgacactgaagagaaaagttcaggacagcaggaggcttgttgccgagcagctgttgggggtttctgaggttatggcggacttttctcgggaaataaaacgggagagggagcagcattttattcaggaagaacaaatgatagaggcgcttcagcatttcggaatcgagattcagcatgtcgagatatacagcttggagcagggcaatattgatatcgaaatgacaatcccgttcagcggaggacacggcgagagtgagaaaattatcgccccgatgctgtctgacattcttgaggagcagatacttgtcaaaagcgaacagcactcggctcatccgaatggctacagccatgttgcgttcggttcgaccaaatcgtaccgggtatcgacaggcgcggctcatgcggcaaaaggcggcggccttgtctccggcgacagctacagcatgatggaactgggggcgagaaaatatgcggccgcaatcagtgacggcatgggcaatggggcgagggctcattatgagagcaacgaaacgattaagctgctcgaaaaaattctcgaatcaggtattgatgaaaaaatagcgatcaaaacgatcaacagtattctgtctttacggacgacagacgaaatctactcaactctcgatctttctatcattgatcttcaggatgcaagctgcaaattcttaaaggtcggttcaacgccgagttttatcaagcggggagatcaagtcatgaaagtgcaggccagcaatctgccgatcggtatcatcaatgaatttgatgtggaggttgtaagtgaacagttaaaagcgggagatctgctcgtcatgatgagtgacggtatttttgaaggaccgaagcacgttgaaaaccacgacctgtggatgaaacggaaaatgaaagggctgaaaaccgaagatccgcaggaaatcgctgatatattaatggaagaggtcatcagaacgcgttccggccaaatcgaagacgatatgacggtggttgttgtccggattgatcacaacacgccgaaatgggcttccataccggtgccggcggtattccaaaataaaaaggagatttcttaatcctttcgtataaatcactttccttctggcgaagatgggactaatcgtatcaccgggaggaatgtatgtgaataagggacatttaaatcaagttctgctgattacagatggctgctccaatcatggtgaagacccgattgcaatggcggctttcgccaaggagcaggggattacggtgaatgttatagggattatggaagaaaacgcgattgaccaagaggcaatgaaggaagttgaaggcatcgccatggccggtggcggcgtccatcaagttgtatatgcgtcacaattgtctcagacggttcaaatggtgacgaaaaaagcaatgacccagacgctgcaaggtgtcgtcaatcaagagcttaaacaaatcttagggaaaaacgttgaaatggaagagctttctccggaaaaacgcggcgaagtgatggaagtggttgatgaactcggagaaacagttcatctgcaggtgcttgtgctggttgatacgagtgcgagtatggcgccgaaactgccgacggtgaaagaagcgctgattgatctttccatcagtttaaattcccgggccggacaaaatgaatttgccatgtgtatatttcccgggaaaagccaggaagttgagcttgtgctgaattggacgccgaagcttgaatccctttctgcgctctttgcgaagctgtcgaccggcggtatcacccctacgggccccgctatccgggaagcgacgcagcagtttgagagaatccgctcaagaaggagcatgttggcagatgatgaacgacgctttaacgagtttggcatgtagtctggcaccggggacggcaattcagggcaaatggaacggcaaatcctacagattgctcaaacagcttggaaaaggggctaacggtattgtatatctggcagaagcatcaggcggacaggtcgctttgaaaataagcagcgacagcatgtctgttacctctgaagtgaatgtcttaaaatccttttcaaaggcccggtcgcaaacgatggggccttctttttttgatgcggacgatgcgtttattccgcagctgaataaaaatgtctctttttacgtgatggagtacatagaagggccgcttcttccgcaatatatcagcagtaagggagcggagtggattccggtgctgatggtgcagcttctttccagcttgtcagtccttcatcagcagggatgggtttttggcgacctcaaaccggaaaatcttattgtaaccggaccgccggctgccatccgctgcattgatgtagggggaacgacaaaacaaggccgcgcgattaaagagtatacggagttttacgacaggggctattgggggtatggaacaagaaaagcagaaccatcctatgacctgtttgctgtcgcaatgatcatgatccactgtgtccagaagaaagagtgcaaaaagtcaggacagccgaaagaacagcttcgttctatcattgaaggccacccgtttctgaataagtataagaaggttctgttttctgctttaaacggccaatatccgtctgcggaagccatgaagcatgacatcctgacggcggggcagagcgccgggagtaaaaggaaagccgccgccaagcctaagccgccgcaatcaaaaccgcggcagggcactgtatctcaaacgcggtataaacctaaacaaaaacccgcaaagcacaatggtttgtttgaaacaacgcttattttaatcagcgttctcgccctttatttcgcttacatcgtcttttttctcatctaatgccggccggacgcctgcgctcatgcttcttctttgcttggagggaatgaaagtgataggatatgtatatctttaaaaaaacctgctcattgtgaggggacattgtgaaaagcgtggaagattttttcaaaacatatcatcttcaggcggagggagaaacgattattgccggggtctccggaggccctgattcaatggcgcttctcagtatgctgaataagcacttcgggcattcttccgttatcatagcggcgcatgtcgaccatcagttcaggggtcctgaatctgaagaagatatgaagtttgtgcagtcatattgcgaagcggaacacatcctctgcgaaacggtacagattgatgtttctgcatacgcaaagaagaataagctgaacaagcaggctgccgcgcgtgattgcagatatcagtttttcgaagatctgatgacaaaacaccaagcgaagtttttggcgctggctcatcacggcgatgaccaggttgagacaatgctcatgaggcttgcgaaaggtacgctcggcgcagggctcgcgggaatgcagcccgtccgcgaatttgcatccggctggctgatcaggcctttcctctatgcggaaaaggatgaaatcctagaatactgccgtcaagaagggctcagctacagaacggatgagagcaatgcaaaagacgattatacaagaaacagattcagaaagaccgtgcttccttttttaaaacaagaatcacctgacgttcataaaatgtttcaaaaggtgagtgaagcactgacagaagacgaacaatacttgcagtcattaacgaaagaacgaatgaataaggttattacaagcaagtctgacacatcggttgaagtcgattcctctcaattgcttgcccttccgatacctttacaaagaagaggagttcaactaatattaaactatctttatgaaaacgttccatcgtcgttttccgcccgccacatacagcagtttctggaatgggcggaaaatggaagcgcctcgggagtgcttgattttccgaaagggctgaaggtggtcaaatcatatcagacatgtttgtttacatttgaacaatggcaatgtgaaaaggttccctttgagctgcagctgcaaggagcggaaggcgagactgctgttctccccaacggctttatgatagaggtggccgatcaggctgaccctcatatcaaaaatgggaatgctgtttttatgacaagcagaaataaggtgcaatttcctttaacaatccggacgagaaaaatcggcgaccggattaaacttaaagggatgaatggctcgaaaaaggtaaaagatatatttattgatcataaactgcctctgcgggatcgggacgaatggccgattgtaacggatgcgagcggtgaaattatctggctgcctggcttgaaaaaatccatctttgacgatcttgtgatttcaaacagtgaccgcattgtattacaatatagacagcatgaaaagtgtagggggcaagcattaacatgaaacaggatatcgaaaaagtgctgatctcagaagatgagatccagcagaaagtaaaacagcttggagaacaattaacaagcgagtacagcgacacgtttccgttggcaatcggtgtgttaaagggagcgcttccttttatggctgatcttataaagcatattgatacatatttggaaatggacttcatggatgtatcaagctacggaaattccacggtttcttccggagaagtcaaaatcatcaaagatttggatacatctgtagaaggccgggacatcttaatcattgaagatattatcgacagtgggttaaccttgagctatctcgtagaactcttccgatatcgtaaagcgaaatcaattaagattgttaccctgttggataaaccaagcggaagaaaagcggacattaaagcagacttcgtaggctttgaagttcctgacgcgtttgttgtgggttacggacttgattatgccgagcgctatcgcaatctgccttacatcggagtattaaaaccggcgatttatgaaagctgatcggctgcctgcttccgagatggttatcggttgtattggaatgattttctatggtactattgaacatagttgtgcttactgtgggaggaggtaaggaatgaatcgggtcttccgtaataccattttttatttacttattttattagtagtaatcggggttgtgagttacttccagacctcaaacccgaaaacagaaaatatgtcgtacagtacgtttatcaagaacctcgatgaagggaaagttgatagcgtatcggttcagcctgtcagaggtgtttatgaggtaaaaggacagctgaaaaaatacgacaaagaccagtactttttaacacatgttcctgaaggaaaaggagcagaccagatatttgacgcaattaaaaagacggacgtaaaagttgatcccgcacaggaaacaagcgggtgggtgacgttcttaacgacgatcattccgtttgtcatcatctttattctgtttttcttcctgctcaatcaggctcagggcggcggcagccgtgtcatgaacttcggaaagagcaaagcgaagctgtatacggaagaaaagaaacgcgtgaagtttaaagatgtagccggcgcggatgaggagaagcaggagctcgttgaggttgttgagtttctgaaagatccccgcaaattcgccgagcttggcgccaggatccctaaaggcgtgctgcttgtcggacctccgggaaccggtaagacattgcttgcgagagcctcagccggtgaagctggcgttcctttcttcagcatcagcggatctgacttcgttgaaatgtttgtcggtgtcggtgcttcccgtgtgcgtgatttattcgaaaatgcgaaaaagaatgcgccttgcctgatcttcattgatgagatcgacgcggtaggacgtcagcgcggcgccggtcttggcggcgggcatgatgaacgcgaacagacgctgaaccagctgcttgttgagatggacggtttcagtgcgaatgaaggaatcattattatcgctgcgacaaaccgtgcggacattcttgaccctgcattgctccgtccgggacgttttgaccgtcagattacggtagaccgtccggatgtcatcggccgtgaagccgtattgcaggtgcatgcgagaaacaaaccgcttgatgagacggtgaacttaaaagcaatcgcttcaagaacacccggtttctcaggcgcagatttagaaaaccttcttaacgaagcggcactcgttgctgcccgtcaaaacaagaagaaaattgatatgcgcgacattgatgaagcaacggaccgtgtcattgcgggtcctgcgaagaagagccgcgtcatctcgaaaaaagaacgcaatatcgtggcgtaccacgagggcggtcacaccgttatcggacttgtgctggatgaagccgatatggttcataaagtaacgattgttccgaggggcaggcaggcggatacgcagtcatgcttccgagagaagaccgttacttccagacaaaacctgaacttctcgataaaattgtcggtcttctgggcggacgtgttgccgaggaaattatcttcggcgaagtcagcacgggggctcacaatgacttccagcgggcaacgaacattgccagaagaatggtgacagagttcggtatgtcagaaaaactcggaccgcttcagttcggtcaatctcaaggcggtcaagtattcctgggccgggatttcaacaacgagcaaaactacagtgatcagatcgcttacgaaattgatcaggaaattcagcgcatcattaaagaatgttatgagcgtgcgaaaaccatcctgactgaaaatcgcgataagcttgaattgattgctcagacattgcttgatgtggaaacattagatgcggaacaaatcaagcatctcgtggatcacggaaaactccctgagcgcaatttctcagatgaccatcttcaaaaagacgatgtgaaagtaaacatcctgtctaaaacagaagacgaaaagaaagacgagccgaaagaatagttcgctttctgatatgaaaaccgccggcgtataccggcggtttttttactggttccgttttgtttacaaaagagccgcagatcgtgtatggtattgtagaatgttgaaaatgttatgattagaaactattcaaaagtggtgatagaggttgttactggttatagatgtggggaacaccaacaccgtgattggtgtatatcatgatggggaattagaatatcattggcgcatagaaacgagcaggcacaaaacagaagacgaattcggcatgctgctccgctccttatttgaacattccggactgatgtttgaacagattgaagggattatcatctcatccgtagtgccgccgattatgttctctttagaaagaatgtgcacaaaatactttcacatcgagccgcaggttgtcggcccgggaatgaaaacaggtttaaatataaaatatgacaatccgaaagaagtgggagctgacaggatcgtcaatgccgttgcagcgatccagcagtatggcggccccttaattgttgttgatttcggaacggcgacgacgtattgctacattgatgaaaacaaacaatacatgggcggtgcgattgctcccggcattacaatttcaacggaagcgctgtactcacgcgcggccaagcttccgagaattgaaatcgcccgaccggataatatcatcggcaaaaacacggtaagcgccatgcagtccggcatccttttcggctatgtcggacaagttgaaggcattgtaaagcggatgaaatggcaggccaaacaagaaccgaaagtcattgcgacaggggggcttgcgtcattaatcgcaaacgaatcagactgtattgatattgttgacccgtttcttactttaaaagggctggaaatcatttatgagcgaaatcgcgtgggtcacatataggaggtaaacgatggattatttaattaaagcaattgcatatgacggtaaagtgcgggcttatgcagccagaacgacagatatggtaaatgaagcgcaaagaaggcatgacacgtggccgacggcatcagccgcaatcggccggacgatgacagcgtctctgatgctcggagcgatgcttaagggtgaagataagctgacagtcaaaatagaaggcggcggcccgatcggagccattgtcgcagatgcgaacgcaaagggtgaggtaagagcatacgtatcaaacccgcacgttcattttgacctcaatgaacaagggaaactggatgtcagacgggcggtcggaactgacggaacactcagtgtcgtaaaagatttgggcttgcgtgattattttacggggcaagtagagattgtctcgggtgaactcggtgatgacttcacgtattaccttgtttcttctgaacaagtcccttcatctgtcggggtaggtgtactagtaaatcctgataacacgattctcgctgcgggcgggttcatcattcagcttcttccggggactgatgaagaaaccatttcaacaattgaaaagcaattatctcaaatcgaaccgatttcaaaattgattcaaaaaggcctgacaccggaagaaatcttagaagaagttctgggtcaaaaaccggacgttctcgaaacaatgccggtcaaatttcactgttcttgttcaaaagatcgattcgaaacggccattttaggactaggcaaaaaagaaatacaagatatgatagaagaagacggaaaagccgaagcggtttgccatttttgtaatgagaaatatttatttacaaaagaagaactggaagagcttcgtgacgaaacaacccgctagctctttagcgggttgttctattttgtaaaagggatggggtagattttgaaatcgagaacacttttgacgattattgtagcggcgctgttggtatgcagtgtagcagtggcgtataagttaacaaaatcccaagccgcggggtcatctgaagaatccatcgcgacaatcggtgataaacatatcacacggcaggactggatgaaaaagatggaagacgagtacggaaaatcaactctggaggatatgattaatgcacaagtagtggaagaacttgcgaaaaagaataaactcacagtttcaaacaccgaattggaacgtgaatttcttttaatcaaagcggtgaataattcattttatgaagacagccatattaccgaaaaagaatggagagaccagatccgctacaacattcttcttgaagaactgctgacgaaggacatcgatatatcggataaggaaatgcaatcattttataataaaaataaagaactgtaccatttcgatgattcctacagaatcaggcacattgtcgtcaaaaacaaggaagaggcggacagggtgcttgctgatttgaaaggcggttccagctttgaagccgtcgccgctgagcgttccacggacagatacacgtctcagtatggcggagacctcggctttgtgacagaaaaccaggaaaatatcccgcaggcatatatcacagaagctaaaaatctcaaagaagatgaatggtccgctgaaccgattaaagtttcttcaggatatgccgtcattcagctgaaagaaaagcttaaagcgagaactttctcatacaatgaagtgaagagtcaaatcagacgccagatcgcgatggatcaattaggtgacaaggcgacagtcaaaacgctgtggaaagaggcgggggtctcttggttctacggggaaaaaagaactaaatgattgacaaaaaattttgaaattgataacttatatttataataccaataaatttagtcggaaattgaggtgtccaacatggtgcgtattgcaaattctattactgaactaatcggaaatactcctattgtgaaattgaatcgcctgacggatgaaaacagtgcagatgtatatctgaagcttgaatacatgaatccgggcagcagcgtaaaagaccgtatcggagcggcgatgattgaagcggctgaaaaagaaggaaaattaaaagccggcgacacaatcattgaaccgacaagcggaaatacaggaatcggtcttgcgatggtggcagcggctaaaggtctcagagccattctcgttatgcctgatacaatgagtatggaacgacgcaatctgctgcgcgcatacggagcggagcttgtgctgactcccggcgcagaaggaatgaagggcgccattaaaaaggcggaagaacttgcggaggaacacggatactttgtgcctcagcaattcaacaatgcggcaaacccggaaattcaccgccaaacgacggggaaagaaatcgtagaacagtttggtgacgaccagcttgatgcgttcgtggccggaatcggtaccggcggaaccatcacgggagcgggcgaagtgctgaaaaaagcatatccatccatcaaaatctatgcggtagagccggcggattctccagttctttccggcggaaaaccgggtccgcataaaattcagggtatcggagcgggatttgtccctgaaacattgaatacggacatctatgatcaaatcattcccgtcaaaaacgaggatgcatttgaatatgcccgtaaaacggcaaaagaagaagggattctcggcggtatttcttccggagcggccatttacgcggcactggaaatcgcgaaaaaactcgggaaaggcaagaaagtgcttgcgatcatccctagtaacggagaacgttacttaagcacaccgctttatcagtttgaatagagacatacacacggctcccggctgtatccgggagtttttttgtgcctgaagtatcgaaaatccaaaaaacgtttcgaattttatggttggaagtgaaattcacttttttcaccagtgtgattgctttaaaataaaactacagtaaaacgaagcagaggattgatatgatggcacaacgcagaccggcaggaagaaaaataccttttacgaaacaagcatttttacagcgatatgaaaacctttcgaaatcgagaaaacggcatgttctgctcgaaagcgcgagagggggaagattcagtatagccggtctagatccgattgcgtccgtcagagggaaagacggaattacaacgatcaagcatgagggagaaacactgtttaaagaaggtgacccgctgcgggcctttcatgaatggtttggaacgctcggaacggaaacaaacgttgagtttccggactttcagggcggtgcgattggttttatcagttacgactatgcccgatatattgagaattttaagatgctgtcgttagatgatctggaaacacctgatatttactttcttgtttttgatgatgtggccgtttatgaccatgaggaagaggcgttatggctcattacccatactgaagcggaagaagcggatcttgcggaagaaaagctgtccggcttagaggacatgtggtgttccctccaaacggcggacgagcctttttcaccgctgaatcggaatggggacggatcgtacgccgctccgttcaccgaggaaggattttcacaggctgtagaacaaattaaacaatatatcgcgagcggggatgtgttccaggttaatttgtccatcaggcagtctcagtctttatccgttcatccgtatgaggtgtataaacacttgcgaaacgtcaatccgtctccttacatggcctatctcgagacaccggggtttcaagtgatatgcgggtcgccggagctattggtgacaaagaaggggaagaagcttgaaacgagaccgatcgcgggtacgcgttcaagaggaaaagacgatgctgaagacaaggctttggctgatgaattaattcacaacgaaaaagaacgtgcggaacacgtcatgcttgttgatcttgagcgtaatgacctcgggcgcgtatcgcgctacggctccgtgcgggttaacgagtttatggcgatcgaaaaatattcccacgtcatgcatatcgtgtcaaacgtacagggagagctgcaggacggatatgacgcgacagacattattcatgcggtgttcccgggggcaccatcacgggagcgcccaaagtgagaacgatggaaattatagaagagcttgagccgacaagacgggggctttatactggatctataggctggttcggattcaacggagatttgcagtttaacattgtgatccggacgatctatgcagccggcggacatgcttttatgcagtccggagcaggagtggttattgattcggttccgaagcatgaatacaaggaatcgttcaaaaaagcttttgcgatgaaaaaggcgttagagctgagcgaagaagagacaaaaaatcagacgaggtgagcagagatgattttaatgattgacaattatgattcatttacgtacaacttggttcaatatttgggtgagctcggggaggaactgatcgtcagacggaatgacgagattacgattgagcagattgaagagctgggtccggacttcttaatgatttctcccgggccgtgcagtcctgatgaagcggggatcagcctcgaagccatcaaacattttgccggcagtattcctattttcggcgtatgtctcgggcatcagtcgattgcgcaagtattcggcggcgatgtcgtcagagcagagcggctcatgcacggcaaaacgtcagaagttatgcatgacggacagacgatttttaacggcctgcaaaatccgctggtcgccacccggtaccattcacttattgtcaaagcggacacgctgccggattgttttacggtatccgctcaaaccaaagaaggagaaattatggccatccgccataatgagctgcctgttgaaggtgttcagttccatccggaatccatcatgacctccttcggcaaagagatgctcagaaactttatagagacacaccgcaaaaaggaagtatcggtgtgattatatatttgaatggtcaatatatagaggagaaagaagcggcgctttctccttttgaccatggttatctgtacgggatcggagcgttcgagacgttcaggctttacagcggccggccgtttctgccggatgcgcatgtcgccaggctcaacagggcgcttcgggatctgcagattgcattcgaggtgaacaaacaggagctgcttgatatgcttcggagactgttgcttctcaatgacataaaggacggcagcgcgcgtgtccggcttaacatctcggcaggcgtcagcgataagggatttgccgcgcagacttatgaaaagccgaccgtcctttgtttcgtgaaccggctcaatccggaaactctgcctgttcaaaaagaaggcaggcttctctctgtccggagaaatacgcctgaaggatctttccggttaaaatcccatcactatttaaacaacatgtacgctaaacgggagatcgggaatgatcccaatcttgaagggattttcctgaccggagaaggagatgtcgcggaaggcattgtctccaacgtgttttggcgaaaaggagacaaggtctttacgccatctttggatacgggaattctcgacggtgtaacaagacagtttgtcattgatgaattgaaacggcaggggacagaagtcaccgaaggccgattccgttttcaatcaatgcttgaagcggatgaagcatggttgacaaactccgtgcttgaaatcatcccgttttctaaaatagaggaagtgccgctgcccggaatgagcgggaaaacggtgcaattgctccgtaagcagtatcggcaggaaataaacaaaatgaatgtacaggaggaggaacaaaatggcgcagcaaacaattgaacagcctaaactgattcatacaaaaaaaggcgctctgtcctataaagagaagacgctcgttatggggatattaaatgtaacgccagactccttctctgacggcggcaaatacgacagtacggaaagggcgcttctgcatgcggcgaagatggctgaagaaggggcgcatatcatagatatcggcggcgaatcgacaaggcccggcgcatcactcgtttcggctgatgaggaaatgtcacgagtcatccccgtcatagaacggattacaagcgagctggacattccgctttcaatcgatacgtacaaagcgtccgtggcagacgaagcggtcaaagcgggagcctctatccttaatgacatctggggggcgaaaggtgaccctgacatggcgtcagtagccgccgcacacggagttccgattatcttaatgcataatcgtatggaaagaaactataacgatcttattcctgatatgcttgcagacttgatggaaagcgtaaaaattgccgcagaagccggcgtcacagatgaaaacatgattctggatccggggatcggctttgcgaaaaactatgaggacaatctggctgtcatgaacaagctggaggtgttcagcgggttagggtatccgctgctcctggcgacatcgagaaaaaggttcatcggccgtgtgcttgaccttccccctgaagaacgtgccgagggaacgggagcgacagtatgccttggcgtccaaaaaggctgcgacattgtgagggtgcacgatgttaaagagatcgcaagaatgactaagatgatggatgctatgctgaacaaaggaggcgcgcattatggataaagtatatgtggaaggtatggagttttacggatatcacggcgtgttcgaggaagaaaacaaactcggccagcgcttcaaagtagacctgactgccgaactggatttgagcaaagcgggaaaaacggatgacctttcttataccattaactatgcggaattgtacagtgtctgccgcggcatcgttgagggcgagcccgttaatttggtcgagacccttgcggaacggatcgcagacaccgtccttgagaaatttgagccggtgcagcaatgtacggtaaaggttgttaagcctgacccgccgattcccggccattataaatcagtagccatagaaatgacgagaaagaaatcatgaacaatacggcatatatcggcctcggttccaatatgggcgaccgtgaacattatttgcgccaggcagtggccatgctcacccggcatgatggcgtgacggtgtcaaagatatcctctatatatgaaacagatcccgtcggttatgaggatcaggatcagtttctcaatatggcggttgaagtgaaaacgtcgttatctccttttgaacttctagatgtaacacagtccattgaagctgaattaggcagaacgagagagattcgctggggaccgcggacggcagaccttgacattttgctgtataatcgtgaaaatattgaaacagagcggctgattgttccgcatccgagaatgtatgagcgcttatttgtccttgcgccgttaaaagaaatatgtccgcaggcggatcatatcacgataagcgctgaaacaaaccaagaaggtgtaagagtatggaagcagaaatctggggtaggcgaattcgtgcattcagaaagctgaaaggttatactcaagaaggatttgcaaaagcattaggtatatcagtttctattgtcggtgaaattgaacgcggaaaccgattgccgtcagatgccatcattcaagatgcggcagatgttttaaatataagtgcggacgaattggccccgcctgaaaaatagacaaatgaaaggaggggaaaaatgtttaaaatcggtgatattcaattgaaaaaccgggttgtgcttgcccctatggccggtgtctgcaactcagcgttcagattgactgtaaaggaattcggagccggattggtatgcgctgaaatggtcagtgacaaagcgatcctttacaacaacgcaagaacaatggggatgctttacattgatgaacgtgaaaaaccgctcagccttcagatttttggaggaaaaaaggaaacccttgtggaagcggcgaagtttgtagatcaaaacacgactgctgatattattgatattaacatgggatgtcccgtaccaaagattacaaaatgtgatgcgggcgccaaatggcttctcgatcctgataagatttatgaaatggtatccgcagtagtagatgctgttgataagccggttacagtgaagatgagaatgggttgggatgaagatcacatttatgcggtgaaaaacgcccaagccgttgaacgtgccggcggaaaagccgttgcccttcacggccgcacaagagtgcaaatgtatgaaggcactgcgaactgggatatcattaaagaagtgaagcaatccgtctccattcccgtcatcggaaacggtgatgtcaaaacgcctcaggacgcgaaacgcatgcttgaggaaacaggagttgacggcgtcatgatcggccgggccgcactcggcaacccgtggatgatttaccgtacggtgcagtaccttgaaaccggtgagttaaaagacgagccgaaagtccgtgaaaaaatgtcggtatgcaaactgcacttagaccgcctgattaagttaaaaggcgaaaatgtggcagtcagagaaatgagaaaacacgctgcctggtatctgaaaggtgtcagaggcaatgcgaatgtacgcaatgaaattaaccaatgtgagacgcgtgaaaaatttgtgcagcttttagatgcatttaccgccgaagcagaggcaaaagagcttcaagatgcaaaagtaggttaatatacaccctctattgctgctcactgccagcttaccgctggcagtttttctgctttttcgtgaaatcaaaatgtaacggagtgataccaatgagtcaagaagagcaaaatcatgaggaattgaacgaccagctgcaagtcagacgagataaaatgaaccagctgagagaaaacggcattgaccctttcggcgaacgtttcgagagaacgcatcaatctcaacaaatcattgacgcctaccaggagctttctaaagaagaactggaagaaaaagcgatcgaagtgaccattgcaggccgtatgatgacaaagcgcggaaaagggaaagccggctttgcgcatctgcaggacttagaaggtcaaattcaaatttacgtaagaaaagacagtgtcggcgaagaacaatatgaaatctttaaatcttcagacctcggagacgttatcggcatcaccgggaaagttttcaaaacaaacgtaggcgagctttctgtcaaagcgacatcttttgaactgctgacaaaagcactgcgtcctcttcctgataaatatcatgggttaaaagacgttgaacagcgttaccgccagcgctatctcgatctcatcgtaaaccctgacagcaaacaaacgtttatcacacgcagcaaaatcatccaagcgatgagaagatacttagatgaccatggatacttagaagttgaaacacctacgatgcacagcataccgggaggagcgtctgcacgcccgttcatcacgcaccataacgcgctcgacatgcctctttatatgcgtattgcgattgaactgcacctgaaacgcctgattgtcggcggattggaaaaagtctacgaaatcggccgcgtgttccgtaacgaaggtgtttctacacgccataaccctgaattcacgatgatcgagctgtatgaagcgtacgccgattataaagatattatgagtcttacggaaaacctcgtagcacatattgcgcaggaagtgcttggaagcaccacaatccagtacggcgaagagcagattgatctgaaacctgagtggaaacgactccacatggtagatgcggtcaaagaagcgacaggcgtagatttctggaatgagatgactgttgaagaagcgcgcggtcatgcaaaagagcatggtatcgagatcacaaactctatgacggtgggtcatatcatcaatgaattcttcgaacaaaaaattgaagaaacactcattcagcctacatttatttacggccaccctgtagagatttctcctcttgctaagaaaaatccggaggaccctcgctttacagaccgttttgagctgtttatcgtcggccgtgagcacgctaatgcgtttacggagctgaatgaccctattgaccagagggaacgctttgaagcgcaattaaaagaaagagaagaaggaaacgatgaagcgcatatgatggatgaagacttcgttgaagctcttgaatacggcatgccgccgaccgggggattgggtatcggtatcgaccgccttgtcatgctgttaacaaatgctccgtctatcagagacgttttattattccctcaaatgagacaacgctaataaaagggaaggcgccgttttctgcttatcgcagtacggcgcttttttagaaacaagccgctcgtaaaactttttgattttctttaaaaaaactattgcactattatttgtgaggtggtatattattattcgttgccgctaaacaaggcgctgacgaaaaaaagaaatttaaaaagttgttgacttcaagagattgataagatataataataaagtcgcttgaacgaaagacaaaatgatctttgaaaactaaacaagacaaaacgtacctgttaattcaaagttttaaataaatcgcacagcgatgtgcgtagtcagtcaaactactttatcggagagtttgatcctggctcaggacgaacgctggcggcgtgcctaatacatgcaagtcgagcggacagatgggagcttgctccctgatgttagcggcggacgggtgagtaacacgtgggtaacctgcctgtaagactgggataactccgggaaaccggggctaataccggatggttgtctgaaccgcatggttcagacataaaaggtggcttcggctaccacttacagatggacccgcggcgcattagctagttggtgaggtgacggctcaccaaggcgacgatgcgtagccgacctgagagggtgatcggccacactgggactgagacacggcccagactcctacgggaggcagcagtagggaatcttccgcaatggacgaaagtctgacggagcaacgccgcgtgagtgatgaaggttttcggatcgtaaagctctgttgttagggaagaacaagtgccgttcaaatagggcggcaccttgacggtacctaaccagaaagccacggctaactacgtgccagcagccgcggtaatacgtaggtggcaagcgttgtccggaattattgggcgtaaagggctcgcaggcggtttcttaagtctgatgtgaaagcccccggctcaaccggggagggtcattggaaactggggaacttgagtgcagaagaggagagtggaattccacgtgtagcggtgaaatgcgtagagatgtggaggaacaccagtggcgaaggcgactctctggtctgtaactgacgctgaggagcgaaagcgtggggagcgaacaggattagataccctggtagtccacgccgtaaacgatgagtgctaagtgttagggggtttccgccccttagtgctgcagctaacgcattaagcactccgcctggggagtacggtcgcaagactgaaactcaaaggaattgacgggggcccgcacaagcggtggagcatgtggtttaattcgaagcaacgcgaagaaccttaccaggtcttgacatcctctgacaatcctagagataggacgtccccttcgggggcagagtgacaggtggtgcatggttgtcgtcagctcgtgtcgtgagatgttgggttaagtcccgcaacgagcgcaacccttgatcttagttgccagcattcagttgggcactctaaggtgactgccggtgacaaaccggaggaaggtggggatgacgtcaaatcatcatgccccttatgacctgggctacacacgtgctacaatggacagaacaaagggcagcgaaaccgcgaggttaagccaatcccacaaatctgttctcagttcggatcgcagtctgcaactcgactgcgtgaagctggaatcgctagtaatcgcggatcagcatgccgcggtgaatacgttcccgggccttgtacacaccgcccgtcacaccacgagagtttgtaacacccgaagtcggtgaggtaaccttttaggagccagccgccgaaggtgggacagatgattggggtgaagtcgtaacaaggtagccgtatcggaaggtgcggctggatcacctcctttctaaggattttaacggaatataagaccttgggtcttataaacagaacgttccctgtcttgtttagttttgaaggatcattcgattcttcgagatattgttctttgaaaactagataacagaagtaattcacattcaattagtaatgcaagatatcacgtagtgattctttttaacggttaagttagaaagggcgcacggtggatgccttggcactaggagccgatgaaggacgggacgaacaccgatatgcttcggggagctgtaagcaagctttgatccggagatttccgaatggggaaacccaccactcgtaatggagtggtatccatatctgaatacataggatatgagaaggcagacccggggaactgaaacatctaagtacccggaggaagagaaagcaaatgcgatttcctgagtagcggcgagcgaaacgggaccagcccaaaccaagaggcttgcctcttggggttgtaggacactctgtacggagttacaaaggaacgaggtagatgaagaggtctggaaaggcccgccataggaggtaacagccctgtagtcaaaacttcgttctctcctgagtggatcctgagtacggcggaacacgtgaaattccgtcggaatccgggaggaccatctcccaaggctaaatactccctagtgaccgatagtgaaccagtaccgtgagggaaaggtgaaaagcaccccggaaggggagtgaaagagatcctgaaaccgtgtgcctacaagtagtcagagcccgttaacgggtgatggcgtgccttttgtagaatgaaccggcgagttacgatcccgtgcaaggttaagcagaagatgcggagccgcagcgaaagcgagtctgaatagggcgaattgagtacgtggtcgtagacccgaaaccaggtgatctacccatgtccagggtgaagttcaggtaacactgaatggaggcccgaacccacgcacgttgaaaagtgcggggatgaggtgtgggtaggggtgaaatgccaatcgaacctggagatagctggttctctccgaaatagctttagggctagcctcaaggtaagagtctcggaggtagagcactgattggactaggggcccctaccgggttaccgaattcagtcaaactccgaatgccgatgacttatccttgggagtcagactgcgagtgataagatccgtagtcgaaagggaaacagcccagaccgccagctaaggtcccaaagtatacgttaagtggaaaaggatgtggagttgcttagacaaccaggatgttggcttagaagcagccaccatttaaagagtgcgtaatagctcactggtcgagtgactctgcgccgaaaatgtaccggggctaaacgtatcaccgaagctgcggactgttcttcgaacagtggtaggagagcgttctaagggctgtgaagcaagaccggaaggacttgtggagcgcttagaagtgagaatgccggtatgagtagcgaaagaggggtgagaatcccctccaccgaatgcctaaggtttcctgaggaaggctcgtccgctcagggttagtcgggacctaagccgaggccgaaaggcgtaggcgatggataacaggttgatattcctgtaccacctcctcaccatttgagcaatgggggacgcaggaggatagggtaagcgcggtattggatatccgcgtccaagcagttaggctgggaaataggcaaatccgtttcccgtgaaggctgagctgtgatggcgagcgaattatagtagcgaagttcctgattccacactgccaagaaaagcctctagcgaggtgagaggtgcccgtaccgcaaaccgacacaggtaggcgaggagagaatcctaaggtgatcgagagaactctcgttaaggaactcggcaaaatgaccccgtaacttcgggagaaggggtgctctgttagggtgcaagcccgagagagccgcagtgaataggcccaggcgactgtttagcaaaaacacaggtctctgcgaagccgtaaggcgaagtataggggctgacgcctgcccggtgctggaaggttaagaggagcgcttagcgtaagcgaaggtgcgaattgaagccccagtaaacggcggccgtaactataacggtcctaaggtagcgaaattccttgtcgggtaagttccgacccgcacgaaaggcgcaacgatctgggcactgtctcaacgagagactcggtgaaattatagtacctgtgaagatgcaggttacccgcgacaggacggaaagaccccgtggagctttactgcagcctgatattgaatgttggtacagcttgtacaggataggtaggagccttggaaaccggagcgccagcttcggtggaggcatcggtgggatactaccctggctgtattgaccttctaacccgccgcccttatcgggcggggagacagtgtcaggtgggcagtttgactggggcggtcgcctcctaaaaggtaacggaggcgcccaaaggttccctcagaatggttggaaatcattcgcagagtgtaaaggcacaagggagcttgactgcgagacctacaagtcgagcagggacgaaagtcgggcttagtgatccggtggttccgcatggaagggccatcgctcaacggataaaagctaccccggggataacaggcttatctccccaagagtccacatcgacggggaggtttggcacctcgatgtcggctcatcgcatcctggggctgtagtcggtcccaagggttgggctgttcgcccattaaagcggtacgcgagctgggttcagaacgtcgtgagacagttcggtccctatccgtcgcgggcgcaggaaatttgagaggagctgtccttagtacgagaggaccgggatggacgcaccgctggtgtaccagttgttctgccaagggcatcgctgggtagctatgtgcggacgggataagtgctgaaagcatctaagcatgaagccccctcaagatgagatttcccattccgcaaggaagtaagatccctgaaagatgatcaggttgataggtctgaggtggaagtgtggcgacacatggagctgacagatactaatcgatcgaggacttaaccaatttgaatgtatgcttactgttatctagttttgagagaacactctcaatggtttggtggcgatagcgaagaggtcacacccgttcccatgccgaacacggaagttaagctcttcagcgccgatggtagtcgggggtttccccctgtgagagtaggacgccgccaagccattacacgtaagtgtaatatatggaggattagctcagctgggagagcatctgccttacaagcagagggtcggcggttcgagcccgtcatcctccaccatatttgccggcctagctcaattggtagagcaactgacttgtaatcagtaggttgggggttcaagtcctctggccggcaccatttttggacaagataataacacaagtcttttaaaaagagccattagctcagttggtagagcatctgacttttaatcagagggtcgaaggttcgagtccttcatggctcaccatgtaacgcgggtgtggcggaattggcagacgcgctagacttaggatctagtgtcttatgacgtgggggttcaagtcccttcacccgcattatacaggatagttatcctgtatgcggaagtagttcagtggtagaacaccaccttgccaaggtgggggtcgcgggttcgaatcccgtcttccgctccaactataccatccacgccggggtggtggaattggcagacacacaggacttaaaatcctgcggtaggtgactaccgtgccggttcaagtccggccctcggcattcattattatgcgcccgtagctcaattggatagagcgtttgactacggatcaaaaggttaggggttcgactcctctcgggcgcgccataatatttttaaaaatcgggaagtagctcagcttggtagagcacatggtttgggaccatggggtcgcaggttcgaatcctgtcttcccgaccacttcggggccttagctcagctgggagagcgcctgctttgcacgcaggaggtcagcggttcgatcccgctaggctccaccatttataaaaaaacatgttgactttaagagaaacttattatatacttaaaaagttgcttgagaaagtgaacaaaatgatctttgaaaactaaacaagacaaaacgtacctgttaattcaaagttttaaataaatcgcacagcgatgtgcgtagtcagtcaaactactttatcggagagtttgatcctggctcaggacgaacgctggcggcgtgcctaatacatgcaagtcgagcggacagatgggagcttgctccctgatgttagcggcggacgggtgagtaacacgtgggtaacctgcctgtaagactgggataactccgggaaaccggggctaataccggatggttgtctgaaccgcatggttcagacataaaaggtggcttcggctaccacttacagatggacccgcggcgcattagctagttggtgaggtaacggctcaccaaggcgacgatgcgtagccgacctgagagggtgatcggccacactgggactgagacacggcccagactcctacgggaggcagcagtagggaatcttccgcaatggacgaaagtctgacggagcaacgccgcgtgagtgatgaaggttttcggatcgtaaagctctgttgttagggaagaacaagtgccgttcaaatagggcggcaccttgacggtacctaaccagaaagccacggctaactacgtgccagcagccgcggtaatacgtaggtggcaagcgttgtccggaattattgggcgtaaagggctcgcaggcggtttcttaagtctgatgtgaaagccccggctcaaccggggagggtcattggaaactggggaacttgagtgcagaagaggagagtggaattccacgtgtagcggtgaaatgcgtagagatgtggaggaacaccagtggcgaaggcgactctctggtctgtaactgacgctgaggagcgaaagcgtggggagcgaacaggattagataccctggtagtccacgccgtaaacgatgagtgctaagtgttagggggtttccgcccttagtgctgcagctaacgcattaagcactccgcctggggagtacggtcgcaagactgaaactcaaaggaattgacgggggcccgcacaagcggtggagcatgtggtttaattcgaagcaacgcgaagaaccttaccaggtcttgacatcctctgacaatcctagagataggacgtccccttcgggggcagagtgacaggtggtgcatggttgtcgtcagctcgtgtcgtgagatgttgggttaagtcccgcaacgagcgcaacccttgatcttagttgccagcattcagttgggcactctaaggtgactgccggtgacaaaccggaggaaggtggggatgacgtcaaatcatcatgccccttatgacctgggctacacacgtgctacaatggacagaacaaagggcagcgaaaccgcgaggttaagccaatcccacaaatctgttctcagttcggatcgcagtctgcaactcgactgcgtgaagctggaatcgctagtaatcgcggatcagcatgccgcggtgaatacgttcccgggccttgtacacaccgcccgtcacaccacgagagtttgtaacacccgaagtcggtgaggtaacctttatggagccagccgccgaaggtgggacagatgattggggtgaagtcgtaacaaggtagccgtatcggaaggtgcggctggatcacctcctttctaaggattttaacggaatattagacctcgggtcttataaacagtacgttccctgtcttgtttagttttgaaggatcattcgattcttcgagatgttgttctttgaaaactagataacagaagtaattcacattcaattgtaatgcaagatatcacgtagtgattctttttaacggttaagttagaaagggcgcacggtggatgccttggcactaggagccgatgaaggacgggacgaacaccgatatgcttcggggagctgtaagcaagctttgatccggagatttccgaatggggaaacccaccactcgtaatggagtggtatccatatctgaatacataggatatgagatggcagacccggggaactgaaacatctaagtacccggaggaagagaaagcaaatgcgattccctgagtagcggcgagcgaaacgggaccagcccaaaccaagaggcttgcctcttggggttgtaggacactctgtacggagttacaaaggaacgaggtagatgaagaggtctggaaaggcccgccataggaggtaacagccctgtagtcaaaacttcgttctctcctgagtggatcctgagtacggcggaacacgtgaaattccgtcggaatccgggaggaccatctcccaaggctaaatactccctagtgaccgatagtgaaccagtaccgtgagggaaaggtgaaaagcaccccggaaggggagtgaaagagatcctgaaaccgtgtgcctacaagtagtcagagcccgttaacgggtgatggcgtgccttttgtagaatgaaccggcgagttacgatcccgtgcaaggttaagcagaagatgcggagccgcagcgaaagcgagtctgaatagggcgaattgagtacgtggtcgtagacccgaaaccaggtgatctacccatgtccagggtgaagttcaggtaacactgaatggaggcccgaacccacgcacgttgaaaagtgcggggatgaggtgtgggtaggggtgaaatgccaatcgaacctggagatagctggttctctccgaaatagctttagggctagcctcaaggtaagagtctcggaggtagagcactgattggactaggggcccctaccgggttaccgaattcagtcaaactccgaatgccgatgacttatccttgggagtcagactgcgagtgataagatccgtagtcgaaagggaaacagcccagaccgccagctaaggtcccaaagtatacgttaagtggaaaaggatgtggagttgcttagacaaccaggatgttggcttagaagcagccaccatttaaagagtgcgtaatagctcactggtcgagtgactctgcgccgaaaatgtaccggggctaaacgtatcaccgaagctgcggactgttcttcgaacagtggtaggagagcgttctaagggctgtgaagcaagaccggaaggacttgtggagcgcttagaagtgagaatgccggtatgagtagcgaaagaggggtgagaatcccctccaccgaatgcctaaggtttcctgaggaaggctcgtccgctcagggttagtcgggacctaagccgaggccgaaaggcgtaggcgatggataacaggttgatattcctgtaccacctcctcaccatttgagcaatggggggacgcaggaggatagggtaagcgcggtattggatatccgcgtccaagcagttaggctgggaaataggcaaatccgtttcccgtgaaggctgagctgtgatggcgagcgaattatagtagcgaagttcctgattccacactgccaagaaaagcctctagcgaggtgagaggtgcccgtaccgcaaaccgacacaggtaggcgaggagagaatcctaaggtgatcgagagaactctcgttaaggaactcggcaaaatgaccccgtaacttcgggagaaggggtgctctgttagggtgcaagcccgagagagccgcagtgaataggcccaggcgactgtttagcaaaaacacaggtctctgcgaagccgtaaggcgaagtataggggctgacgcctgcccggtgctggaaggttaagaggagcgcttagcgtaagcgaaggtgcgaattgaagccccagtaaacggcggccgtaactataacggtcctaaggtagcgaaattccttgtcgggtaagttccgacccgcacgaaaggcgcaacgatctgggcactgtctcaacgagagactcggtgaaattatagtacctgtgaagatgcaggttacccgcgacaggacggaaagaccccgtggagctttactgcagcctgatattgaatgttggtacagcttgtacaggataggtaggagccttggaaaccggagcgccagcttcggtggaggcatcggtgggatactaccctggctgtattgaccttctaacccgccgcccttatcgggcggggagacagtgtcaggtgggcagtttgactggggcggtcgcctcctaaaaggtaacggaggcgcccaaaggttccctcagaatggttggaaatcattcgcagagtgtaaaggcacaagggagcttgactgcgagacctacaagtcgagcagggacgaaagtcgggcttagtgatccggtggttccgcatggaagggccatcgctcaacggataaaagctaccccggggataacaggcttatctcccccaagagtccacatcgacggggaggtttggcacctcgatgtcggctcatcgcatcctggggctgtagtcggtcccaagggttgggctgttcgcccattaaagcggtacgcgagctgggttcagaacgtcgtgagacagttcggtccctatccgtcgcgggcgcaggaaatttgagaggagctgtccttagtacgagaggaccgggatggacgcaccgctggtgtaccagttgttctgccaagggcatcgctgggtagctatgtgcggacgggataagtgctgaaagcatctaagcatgaagccccctcaagatgagatttcccattccgcaaggaagtaagatccctgaaagatgatcaggttgataggtctgaggtggaagtgtggcgacacatggagctgacagatactaatcgatcgaggacttaaccaatttgaatgtatgcttactgttatctagttttgagagaacactctcaatggtttggtggcgatagcgaagaggtcacacccgttcccatgccgaacacggaagttaagctcttcagcgccgatggtagtcgggggtttccccctgtgagagtaggacgccgccaagctatatttacggtaaaggcagctcatcatgagctgccttttttgtgtttttctgcatacgttatatagtatgagaaaagtaacgatatggctttttgcaaaagcaggttttatgcttgtgtaaagtggaaataatagagatagagcgatacagttgaaaaattttgcgaaacaccttatagtaagattaaagtcaaatatagtcaaagtcaataaaggagggggttgagtgggacataatatttctgacatcattgaacagtacttgaaacaagtattagatcaaaatggcaaagaaattttagagatcaaacgcagtgaaatcgctgataaatttcaatgtgttccttcccaaataaattatgtcatcaacaccagatttacaagtgaaagaggatatattgttgaaagtaaacggggaggcggcggttatattcgtattatcaaaattaaaatgaataacgaagtcgtcctcatcaataatattatttcgcagatccatacccacttgtcccaggcagcctctgatgacattattctcagactgttagaggacggagttatttcggaaagagaagctaaaatgatggtgagtgtaatggatcgttcagttctatatattgatttgcccgaacgggatgaactaagagccagaatgatgaaagcaatgctcacatctttaaaactaaagtaagcgggtgaaaagattgatttgtcaagaatgcaatgagagaccggccacttttcactttacgaaagttgttaatggagaaaagcaagaagttcatatttgtgaacaatgtgcaaaagaaaatagcgattcatacagtataagtggaaaccaagggttctcaattcataatttattatcaggactgctgaatatggagtcctcatttcaaaacaccggttctcaaatgttcggctactcagagcaaggcacagcttgtaagaaatgcggtatgacgtttcagcagctgagaaaaacagggcgtttcggctgtgcggaatgttacgatacgttctacagccaaattacgccgatcttgcgaaaagttcacagcgggaatacggtgcatgccgggaaaattccaaaacgaataggcggaaacctgcatgtaagacggcaaatggaaatgttaaaaaaagaacttgaatctttaatacaccacgaagagtttgaaagagcagcggaggtcagggatcagatccgatcgttagagcaggaattaaaaagtacagacagtgagggggaacaagggtaatgtcgctcaagcattttattcaggacgcactaagcaattggatgaagcaaaagggacctgaaagtgacattgtactcagcagccgtatacggttggcccgaaactttgaaaatataaagtttcccgcccggtatacgaatgaagaagcctcatccatcattcagcaattcgaagatcatttttcaggtaaggaactgcctgatatcggtcaatttcatttaatcagaatgagtgaagctcagcctttggaaaaacgggtgctgatggagaaacatctgatcagcccgaatttaacggaatctccttttggcggctgtctgctttctgaaaatgaagaagtcagcattatgttaaatgaagaagatcatatcagaattcaatgcctcttccccggcttccagcttctcaacgccataaaagcggcaaaccaggttgatgactggattgaggagaaagtggattacgcctttggagagaagagagggtacttaacaagctgtcctacaaatgtagggacgggactaagggcttcagtcatgatgcatttgccgggtcttgtattaactaggcaaatgaatcgaattataccggcaattaaccaattaggcttagttgttagaggaatttacggtgaaggcagcgaagcattaggaaatatctttcaaatttcaaatcaaatcacactcggaaaatcagaacaggacattgtagatgatttaaacagtgtggctgcccagctgattgagcaggaacgttcagcccgagaagcgctttaccaaacttcgaaaattgaattggaggaccgggtattcagatcttacggcgttttatccaactgccgtatgattgaatcaaaggaaacggcgaaatgcctttctgacgttcggctggggatagaccttgggatcatcaaagggctatcaagcaatatacttaatgaactgatgattttgacacagccgggttttctccagcaatattcgggcggtgcattacggccgaacgaaagagacgcgagaagagcggcgcttatcagggaaaggctgcatttagaaatgagtgcaaatagacaggaggatgattcgatatgatgtttggaaggtttacagagcgagctcaaaaggtattggcactggcacaggaggaagcactgcgcttaggccataacaatattggaactgaacatatcttattaggtctggttcgtgaaggagaagggattgcggctaaagcactccaagcactcggactcggttcggataaaattcagaaagaagtggagagcttaatcggacggggacaggaaatgtctcaaacgattcattatacgccaagagcaaaaaaagtcattgagctcagcatggatgaagccagaaagctaggacattcttatgtgggaacagaacacatacttctcggattgatccgtgaaggagaaggcgtggcggcgagagttctgaataatctcggtgtcagcttaaataaagcgagacagcaagtgctgcagcttctgggaagcaatgagacggggtcttctgcatccggtaccaacagcaatgcaaacacgccgacgcttgacagtctggcgcgtgatttaactgcgattgcgaaggaagacagtcttgatccggttatcgggcgaagcaaagaaattcagcgtgttattgaggtattaagccgcagaacgaaaaataatcccgttcttatcggagaaccgggtgtaggtaaaactgcgattgctgaaggcctcgcacagcagatcatcaataatgaagtgccggaaattttacgtgataaacgcgtaatgacgttagacatgggtacggttgtagccggtacgaaataccgcggagaatttgaagaccgcttgaaaaaagtaatggatgaaatacgtcaggccggcaatattattttattcattgacgaactgcatacactgatcggagcggggggagcagaaggtgcgattgacgcatcgaatattttaaaaccttcactggcccgcggagagcttcaatgcatcggtgccacaacgcttgatgaataccgtaaatatatcgaaaaagacgcggctctcgagcgccgtttccagccgattcaggtggatcagccgtcagccgatgaaagcattcaaattttaaaagggctccgtgaccgctatgaagcgcatcaccgcgtatccattaccgatgaagcgatcgaagccgcggttaaattgtccgaccgttatatttctgaccgcttccttccggataaagcgatcgatttaattgatgaagccggttcaaaagtgcgtctccgttctttcacaacgcctccgaacttaaaagagcttgagcagaaactcgatgaagttcgcaaggaaaaagacgctgccgttcagagccaggagtttgaaaaagcggcttcccttcgtgatacggagcagcgcctgagagaacaggtggaagacacgaaaaaaacctggaaagaaaaacaaggccaggagaactccgaagtttctgtagaggatatcgcgatggttgtatccagctggaccggggtgcccgtatctaaaattgcccaaacggaaacagataagcttctcaatatggaaagcattctgcattcccgcgtcatcggccaggatgaagccgttgtagccgtggcaaaggctgtcagacgtgcaagagccggactgaaggacccgaaacgtccgattggttcattcatcttcttaggccctacaggcgttgggaagacagagctggcaagagcgctggcggaatccattttcggtgatgaggaagcgatgatcagagtggatatgtccgaatacatggagaaacactcgacttcacgtcttgtcggttctcctccgggatatgtcggctatgatgaaggcggccagctgacagaaaaagtgagaagaaaaccttactctgtcgtattgcttgatgaaattgaaaaagcacaccctgatgtgtttaacattctcctgcaagtgcttgaagacggacgcttgactgattcaaaaggacgcactgtggatttccgcaacacgatcctgattatgacgtcaaacgtcggggcgagcgagctgaagcgcaacaaatatgtaggcttcaatgtccaggatgaatcacaaaaccataaagacatgaaagacaaagtcatgggagagttgaagcgtgccttcagacctgagtttatcaaccggattgacgaaattatcgtcttccactcccttgagaaaaaacatcttacagacatcgtgtcgcttatgtctgatcagttaacaaaacgtctgaaagaacaagatctctctatcgagctgacggatgctgccaaagcaaaagtagcagaagagggcgtcgatttggaatacggcgcacgtccgttaagaagagcgattcaaaagcatgtggaggaccggttatcagaagaactcctcagaggcaatattgataaaggccaacacattgttcttgatgttgaggacggcgaatttgtcgtaaaaacaactgctaaaacgaactaatatagtgacaaacatgaggcatacgtaagcgagtgtatgcctcactttgttatatagagaaatattcgataaggaagaggtcttacaacatatatggctaaatcaaaaacaaaattcatctgccactcatgcggttatgaatccgcaaaatggatgggaaagtgcccgggctgcggggcttggaatacaatggtggaagaaaccataaaaaaagcgccggcgaatcggcgggcggctttctcccactccgttcaaaccgtccagaaaccatcacccattacatcaattgaaacatcagaagaaccccgcgttcaaacaaagctcgaagaattcaacagagtgcttggcggcggcgttgtgaaaggctcgttagtattgatcggcggcgatcccgggatcggaaaatcaacgctccttctccaagtatccgcacaattagcagatacggccggcagcgtgctttacatttcaggggaagaatccgtgaagcaaacgaagctgcgcgccgacagacttggcatcaacagccaaatgttacatgttttatctgaaaccgatatggagtatatttcgtctgctatacaagagatgaaacccgcatttgttgtcgtagactccattcagaccgtttaccaaagtgatatcacctcagctcccggcagtgtatcacaagtaagagagtgtacggccgaattgatgaaaatcgcgaaaacaaacggcatacctatttttatcgtcggacacgtcacaaaagaaggatcgatcgcagggccgagattgcttgagcacatggtcgataccgttctatactttgaaggagagcggcatcatacattccgtattttgcgggccgtaaaaaaccgtttcggctcaacaaatgaaatgggcatctttgaaatgcgggaagaggggcttacggaagtgctcaacccttctgaaattttcttggaagagcgttctgccggggcatcgggttcgagtatcgttgcgtcaatggaaggaacgagaccgattctggttgaaatccaggcgctcatatcaccgaccagttttggaaacccgcgccgcatggctacaggcattgaccacaacagggtatcgttaattatggctgtgcttgagaagcgggtgggtcttttgcttcaaaatcaagatgcatatttaaaagtcgccggcggggtcaaactggatgaaccggcgattgatttggcagtagccgtcagcattgcctcaagcttcagagatacaccgccgaatcccgcagattgctttatcggtgaagtgggactgacaggagaagtccgcagggtgtcaagaatcgaacagcgcgtaaaagaagcggcgaaactcggcttcaagcgcatgatcatacctgaggcgaatgcagatgggtggacaataccaaaagggattgaggttgtcggagtagcaaatgttgcagaagcgcttcgtacttcattaggaggatcataatagatggaaaaagagaaaaaaggggcgaaacaagagcttgacctgtctgcaattctgcagttcgttgcaccgggcaccccgctcagagccgggatagagaatgtacttcgggcaaatacaggcggcctgattgttgtcggatacaatgataaggtaaagcaagtcgtcgatggcggttttcatattaatacatcatttgcgcccgctcacttatacgagctggccaaaatggacggtgccattattttaagtgattccggccagaaaattctttatgcgaatacacagcttatgccggaggcgaccatttcttcttcagaaacgggaatgaggcaccgtacggcggaacgggtggcgaagcagaccggctgtctcgtcatcgccatttctgagcgcagaaatgtcattacgttatatcaggacagcatgaagtacacactaaaggacataggttttattttaacaaaggcaaatcaggccattcaaacgctcgagaagtataaaaccattttagacaaaacaattacggctctaaacgcattagagtttgaggagcttgtgacattcagtgacgtgctgtctgtcatgcatcggtatgaaatggtgctccgaataaaaaatgaaatcaatatgtatattaaagaactcggaacggaaggacacttaatccgtctgcaggtgattgaactgattacggacatggaagaagaggcggcacttttcatcaaagactatgtcaaagaaaaaatcaaagatccgttcgtgctgttaaaagagctccaggatatgtccagctatgatctgctggatgattccattctgtttaaactgcttggatacccggcttctacgaatcttgatgattatgtgctcccgagaggctacaggctgctgaacaaaattccgcgtctgccgatgccgattgttgaaaatgtggttgaggcgttcggatttttgcccagcataacggaagccactgtagaagagcttgatgatgtcgagggtatcggcgaagtgcgcgcccaaaaaatcaaaaaaggcttaaaacgccttcaggaaaaacactatatagatagacagctttaagtatcgcttaaacctgtcggaatccgggtatattattgttagtttttgtttattctgaatttgtaggctctgacagtctgctgaaaaaatgctacttaaaaggaggtggaggtatgttaaaacgaatagttcaggcgttcttcattattgtgggcggcgttgtcggtatctttttaatacctgaattgtttgtgctgtcaaatatacaggacatacctttaataacaaacgcatatacgtctgctgcaattggtgctattatcttttttctcatcagtatatggacgacagaatatgtgattaattgggtaaaatggattgaagattctttgctgagagctccggtgccggatctgttattcgggagtctcggattggtttttggacttatcatcgcatatctcattgtaaacgtgattccgctggacaatattccgtaccgtatattcagcaccatcattccggtctttctggctttctttctcggttatctgggcttccaagtcggatttaagaaaaaggatgaactgatcagtcttttctccatttctgcaagaatgcagaagaaaaagggaagtgctgatgaggagcaggaagaacaggataaaaggctgaaaatcttggatacaagtgttattattgatgggagaattgcagatatttgtcagacgggctttttagaaggcgtcattgtcattcctcaatttgtgctggaggaattacagcatatcgctgattcttcagatgttttaaaacgtaacagaggacgccgcggactggatatcttgaatcgcattcaaaaggaactggatattacggttgaaatttatgaaggcgacttcgaagacattcaggaggttgacagcaagcttgtcaaacttgcgaagctgacatccggtgtcgttgtgacgaatgattttaatttaaataaagtatgcgagcttcaaaaggttgcggtactgaatattaatgaccttgcaaacgcggtgaagccggttgtgcttccgggcgaagagatgaatgtgcaggtgattaaggacgggaaagagcataatcaaggtgtggcttacttagatgacggcacaatgattgttgtggaagaaggccgcaattatatagggaaacatattgatgtgctcgtaaccagcgtactgcagacagcggcgggacgaatgatttttgccaagcccaagctgcttgagaaagctctttaagagggagttcatatggagtatgttgtcgttattccggctgccggacaaggaaaacggatgaaggccgggaaaaataagctgttcatcagcttaaaaggtgcgcccgttattatacacacactgcgggtttttgaaagccacgcaccctgtcagaaaataatcctggtgataaacgagagtgaacgggaagattttcgccagctgctggtccaatttccgattcagacggaaattgagcttgttaccggaggtgcggagcgtcagcacagtgtatacgaaggactgaaagtgattgataaggaatcggtcgtgcttgttcatgacggagcgcgcccgtttgtcacacatcagcatatcgataagctcgttgaaacagcagaggaggcgggagcggctgtcctggctgttcctgtgaaagacacgataaaacgggcggaaggctcccgggctgcggagacctttgatcgttcaagcttgtgggccgttcaaacgccgcaagcttttcgtctttctttattgaagacggcgcatatggaagcggaaaacaaaggcttcttaggtacggatgacgccagcctcgtcgagcgtcttgatggatatcaggtgagtatcgttgaaggcagctataccaatattaagctgacaacgccggatgacctgatatttgcggaagcaatcatgaaagcggaaagtgggaatcataatgtttagaatcggacaaggatttgatgtgcatcaattaacggaaggccgtccgctcatcatcggcggaattgaaattccttatgaaaagggactgctcggacattcagatgctgatgtattgctgcatacagtcgcagacgcgtgtctcggagcggcaggtgaaggagatatcggcaagcatttcccggatactgatccggaattcaaggatgctgattcttttaagctgcttcagcatgtctggaacattgtaaaagaaaaagggtacgtactcggaaatatagactgcacgattattgcgcaaaagccgaaaatggcgccgcatattgatgctatgagaaaacggatagcggaaggccttgaggcggacgtctctcaagtaaacgtaaaagcgacgacgactgaaaagctcgggtttaccggaagagccgaaggaattgccgctcaggcaaccgttctgattcaaaaagcctgatcattgttttgatgccgggtctatttggtggtagaatagatacatatattcggctagaggctacagacgagatgaaaggaagtatttgaacatgggaaatgaagtacgcgttcgttatgcaccgagtccgaccggacatttgcatatcggtaacgccagaacggcgctttttaactatttatttgcccgcagccaaggcggaaagtttattatccggattgaggatacggacaaaaagcgaaatattgaaggcggagagcaaagtcagcttaactatttgaaatggctcggcatggactgggatgaaagtgtggatgtcggcggagaatacggcccgtaccgccagtctgagcgtaacgacatttacaaagagtactatgaagagcttcttgaaaaagggcttgcttataaatgtttctgtacggaagaagaacttgaaaaagaacgtgaagagcaaatcgcccgcggggaaatgccgcgctattccggcaaacacagaaacctgactcaggaagagcaggagcagtttttagccgaaggcagacagccgagcatccgtttccgcgtgccggaagggaaaatcatcgcatttaacgatatcgtaaaaggcgagatttcttttgaatcagacggcatcggcgactttgtcatcgtcaaaaaagacggaacaccgacgtataactttgccgtcgcgattgacgattacttaatgaaaatgacgcacgtgctccgcggtgaggatcacatttcaaatacaccgaaacagatcatgattttccaggcattcggctgggatattcctgtcttcggacatatgacgcttatcgtaaacgaaagccgcaaaaaattaagtaaacgtgatgaatcaattatccagtttattgagcagtatgatgagctgggttacctgcctgaagcgctgtttaactttatcggacttctcggctggtctcccgtcggtgaagaagagcttttcacaagagaacaattcattgaaatttttgatgtaaatcgtttgtctaagtcaccggctctgtttgatatgcataaactgaaatgggtcaacaaccaatacgtcaaagcgctggatcttgatcaagtggttgagctgaccctgccgcacctgcaaaaagcaggaaaagtcggcactgagctttctgccgaagaacaggaatgggttcgtaaattaatctctctttaccatgagcaattgagctacggcgctgaaattgtcgagcttactgatttgttctttaaagatgagatcgagtataatcaagaggcaaaagccgttctggaagaagaacaggtgcctgaagtgctcagcgtatttgctgcgaagcttgaagagcttgaagaatttacgcctgagctgatcaaagcctcaatcaaagctgttcagaaagaaacaggccataaaggcaaaaagctgttcatgccgattcgtgtagcggttaccggtcagacacacggtccggagcttccgcaggccattgagctgatcggcagagaaacagccgtcagacgcctgaaaagcatttaaatatacgattgttgacagggaagagtataaaacaatgaccattacagaaagaatcttcatcggctgagagagattcatgcgtcatgttttagaagtgcgcccttaagacctttgaagaacatttctgcggaaatcagtatttaaaggcggccgccgccgttaccggcttttaagttgggaaaacattgacttgtttttcaaacagagtggaaccgcgcggtaaaagcgtctctgtcatgtttacatgcagaggcgctttttttataggcggaaaaacagactggagcggggagagaatggggggaagcatgtgttttttaaaatgctaaaagaagacatagatacagtgttcgatcaagatccggcagcaagaagctatttcgaagttgttttaacttattctggtttacatgctatatgggcgcatcggattgcacatgctttatataaacggagatttttcttcctggcgcgcctgatatcacagattgcccgtttctttaccggaattgaaatccatcccggcgcgaccatcgggagaaggtttttcattgaccacggtatgggggtcgtcataggggaaacatgtgaaatcggcaataacgtgacggtattccaaggtgtcactctcgggggaacgggaaaagaaaaggggaagcggcatccgaccataaaagatgatgctttaattgcaaccggagcgaaggtgctcggctctattacggtcgggcagggttctaaagtaggggccggctccgttgtgcttcgtgatgttcccgacttttcgaccgttgtcggcataccggggaaagtcgtcattcagaacggaagaaaaatcaaacgcgatctcaatcaccaagacttgcccgatccggttgctgaccggtttagagcattggagcagcagatttttgaactgcaggctgaactggaagataaaaaagaaaggatcaaccaaaaatgaccattacactttataatacattgacacggaaaaaggaaacatttgttcctcttgaggaaggcaaagtaaaaatgtacgtgtgcggacctactgtatacaactatattcatatcggaaacgctcgtccggcgattgtgtatgataccgtacgcaactatttggagtataaaggatacgatgttcaatacgtatcgaatttcaccgatgttgacgacaaactgattaaagcggccaacgagctcggcgaggacgtcccgaccgtttctgaacggttcattaaagcgtattttgaagacgtgggcgccctcggatgccggaaagcggatcttcacccccgggtcatggaaaacatggacgccattattgaatttgtcagcgagctgattaaaaaaggctacgcttatgaatcagaaggcgacgtctatttcaaaacaagggccttcgaaggctacggcaagctatctcagcaatcaattgatgaactcagatcaggcgcgcgtatccgtgtcggcgagaagaaagaggatgcgctggactttgcgctttggaaagctgctaaggacggagaaatttcatgggatagcccttggggaaaaggccgcccgggctggcatattgaatgctccgcaatggtgaaaaagtatttgggtgacgaaatcgatattcacgccggcggtcaggacctgacattcccgcaccatgaaaacgaaatcgcgcaatctgaagcattaacaggcaagacattcgcaaaatactggcttcacaacggatatatcaatatcgataatgagaaaatgtcaaaatcgctcggcaactttgttttggtgcacgatatcattaagcaatatgacccgcagcttttgagatttttcatgctttccgttcattaccgccacccgatcaactattcggaagagctgcttgagaaaacaaaaaacgcgtttaaccgcctcaagacggcatacagtaatttaaaccatcgtttgattagcagcacgaatctgactgacaatgatgaggaatggctcgctaaaatcgaagagcaccgcgcttcgtttgaagaagcaatggatgatgattttaatacggcgaatgcgatttccgtttggtttgatctggcgaagctcgccaattactacatgcaggaagacaatacggcggatcacgtcattaaagcctttatcagcatgtttgacagaatcggatctgttctcggacttacgctcggcgaagaagagcttgtcgacgaagagattgaagagttgattgagaagagaaatgaagcccgccgcaatcgcgatttcgctttgtcagaccagattcgcgatcagctgaaaagcatgaatatcattcttgaagacacagcccagggaactcgctggaagcggggagaataagcggatgcttcaatttgaacaaatcaaagattcaaagcagttaaacggtcttgcgcttgcttatatgggtgatgccatttttgaaatatacgtccggcatcacctgcttaagcagggctttacgaaaccgaatgaccttcataagaaggcgagccggattgtatcggcaaaatcacaggcagacatattgttccgccttcaggacgaatcctttttcacggaggaagaggaagccgtgctgagaagaggcagaaacgcgaaatcagggaccacgcctaaaaacacagatgtacagacgtaccgccatagtacagcttttgaggctttactcggatacctttttcttgagaaaagagaagaaagactgaatcagctgattgctgaggctatacaagtcgggacgtcagggaggaaaacaaatgagtcagcaacatgattacgtcataggaaaaaacgctgtgattgagacgttaaagtcagatcgcaagctgtataagttatggatggcggaaaacacagtaaaaggacaggcgcagcaagttatggagcttgctaaaaagcgcggcgtcaccattcaatttgtaccgaggaaaaaactcgatcagatggtggaggggcagcatcagggtgttgtcgcccaggtggcggcatatgaatatgcacaattagacgaattatataaaagagcggaagagagaaacgaacagcctttctttctcatattggacgagctggaagaccctcataatctcggttccatcatgagaacggctgacgctgtcggtgcacacggcattgtgattccgaaacgcagagcggtcggactgacatcgacggtcgcaaaagcttcgaccggtgcgattgaacacattcccgtcgtgaaggtgaccaaccttgcccggacacttgatgaaatgaaggagcgggggatttgggtcgtcggaacggatgcatccgcccgggaagactaccgctctatggacggcaagatgcctttggcgctcgttatcggaagcgaaggcagaggaatgggccggcttgtgaaagagaaatgtgattttctcattaaacttccgatggccggaaaagtcacgtctctgaatgcgtcggtagcggccggccttctcatgtatgaagtctaccggaagcgcaatcctttaggggaataatgacagatggacatcctgttagtagacggatacaacatgattggagcttggccgcagctaaaggatttaaaagcgaacagttttgaagaagcgagagatgtactgatccagaagatggcggaatatcagtcctacacgggaatcagagtcattgtggtgtttgacgcacatctggtaaaaggcatagagaaaaaacaaacgaatcacagagtcgaagtgatttttacacgggagaatgagacggcggatgagcggatcgagaaacttgcccaggcgctgaataatattgcgacacagattcatgtcgcaacctccgattatacggagcagtgggcgattttcggacaaggggctctccgcaaatccgcccgggagcttctgagggaagtggatacgatagaacggcggattcaaaggcgggtttcaaagatcacttctgaaaaaccaccgggtaaaatcgagctgtccgaagaggttttgaaaacgtttgaaaagtggcgccgaggcggtctggattaggttgacgctttttcgcccattaatgtataatatttctatctacgtgcgccggggggatcgcagtgaatctacagaacagcaagggaaagttcaacaaagtgcaattttgccagttggaggacgagcaggtcattgaaaaggttcatgttggggatagtgatgcgttagattacttgattacgaagtaccgtaattttgtacgggcgaaagcaaggtcttattttttaataggggccgacagagaagatattgtacaggaagggatgataggcttatataagtctatccgagactttagagaggacaagcttacttcatttaaagcttttgcagaattatgcattacccgccagattattaccgcaataaagacagctacccgtcagaaacacattcctttaaattcctatgtttctttagacaaacctatttttgatgaagaatctgacagaacactgcttgatgtcatttcaggcgctaaaacgttaaatcctgaagagatgattattaatcaggaagaatttgatgatatcgaaatgaaaatgggagaactgctgagcgatctggagagaaaggtgcttgttctgtacttggacggaagaagttaccaggaaatttcagatgatttaaaccgacacgtaaaatcaatcgataatgccctgcagcgcgtgaagcgcaagcttgaaaagtatttggaaataagagaaatcagtctgtagcgggtttctgtgtcatattgacagaatttttctgactgtgctattttattaagataaatgattgtttaggaaaaggtgtaacgacatgagaaaaaagattacgctggcatgcaaaacatgcggaaatcgtaattatacgacaatgaaaagctctgcatcagcggctgagcggttagaagttaagaagtactgcagcacttgcaattcacatacagctcatttagaaacaaaatagtgttcgctttttaaattgtggaggtcttttacatgcgcatgatgagtttctttaaagatgttgggaaagaaatgaaaaaggttagctggcctaaaggcaaagagttaacgcgctatacgatcacggtgatttcaacggttatcttttttgttatcttttttgccctccttgatacaggaatttctcaattaattcgtttaatagttgaataatgatcagcaatacgtgctataatagatcataatatcgtttgccaaaacccgttcagcgggttttttattgtgttgaaaaaaggattcataggctctgagcctattttttgttttacacttcatttttaaatgcggggagggaaggactgcagagtcctgatagaatggaaaagaattggtatgttgttcatacgtattccggttatgaaaacaaagtaaaagcgaaccttgaaaaacgtgtggaatcaatgggaatgcaggataaaattttccgcgttgtcgtccctgaagaggaagagactgatattaagaacggcaagaaaaaagtagtcaaaaagaaagtgttcccgggttatgtgcttgttgaaatcgtcatgactgatgattcctggtatgtggtccgcaacacgccgggcgttaccggattcgtcggatcagccggttcaggctcaaagccgactccgcttcttcctggcgaagcggaaaccatcttaaagcggatgggcatggatgagcggaaaaccgacattgattttgaattgaatgagacagtcaaagtcatagacggacctttcgccaactttacaggatcaattgaagagattgattatgataagagcaaagtgaaagtattcgttaacatgttcggccgtgaaacgccggttgagctggaatttacccagatcgacaaattgtaatgtgaaaaaacttgaaattgctatatattaatgataatatagcaaaggtacgtcttggactaatccaaggcagctagcttgatatttcgtcattcatataaagaatgaaaccttgagtgggagggtttaccctattaccacatcacggacttaaggaggtgtgtctcgtggctaaaaaagtagtaaaagttgtaaaattgcaaattcctgctggaaaagctaacccagcgccgccagttggacctgcactaggtcaagccggtgtaaatatcatgggattctgtaaggagtttaacgctcgtacagctgaccaagctggtttaatcattcctgttgaaatttcggtttacgaagaccgttcatttacatttattacaaaaactccgcctgctgcagtattgcttaaaaaagcagctggaattgagtctggttctggtgaaccaaaccgtaataaagtggcaaccgttaagcgcgataaggttcgcgaaatcgctgaaacgaaaatgcctgacttaaacgcagcagacgttgaagcggcaatgcgcatggttgaaggtactgcccgcagtatgggtatcgttatcgaggattaatttgtttcttgtcgggttgcgagttttcacaagttcgcaacccttattcgtgggaggttattccgctataaccacataaggaggaaattttaaaatggctaaaaaaggtaaaaagtacgttgaagctgcgaagcttgtagaccgtgcgaaagcttacgacgtcgctgaagcagtggcgcttactaaaaaaacaaacacagctaaattcgacgctacagttgaagttgcttttcgtttaggggttgaccctcgtaaaaacgatcagcaaatccgcggtgcagttgtacttcctaacggaactggtaaaactcagcgcgtgcttgtattcgctaaaggcgaaaaagcaaaagaagctgaagctgccggtgcagactacgtcggtgattctgattacatcgcgaaaatccagcaaggctggttcgaattcgatgtaatcgttgcgactcctgacatgatgggtgaagtcggtaaaatcggccgtgtgcttggaccaaaaggtcttatgccaaaccctaaaacaggaactgttacattcgaagtagaaaaagcaatcggcgaaatcaaagctggtaaagtagaataccgcgttgacaaagctggtaacatccatgttccgatcggaaaagtttctttcgaggatgaaaaacttgttgagaacttcacaacaatgtatgatacaatcctgaaagcaaaaccggctgcggctaaaggtgtttacgtgaaaaacgttgccgttacttctactatgggccctggtgtcaaagtagacgcttctactttcaacgtaaaataatatttgactttagatcagcattctgatatgattcaaaatgttgtaaaatataatatgtcatttataccgtagacagcaggggccgttgaggcttaatatcctgccgaggtgtatatatatcacagctattacgttacgtatgcttgtatatacagcctccatgtccacatggaggctttttatatgaaatcgtcgtcacagtcgtgatcacctagcggtataagtgttacacaaaatctacaggaggtgtaaccatgagcagcgcaattgatacaaaaaaagttgttgttgaagagattgcttctaaactgaaagaaagcaaatcaacgatcatcgttgactaccgcggacttaacgtttctgaagtaactgaactccgtaaacagcttcgcgaagctaacgtagagttcaaagtgtacaaaaacacaatgactcgccgtgcggttgaacaagctgaacttgatggtttgaatgatgtcttaactggaccgaatgcgatcgcattcagtactgaagatgttgtcgctccggcaaaagttcttaacgagttcgcgaaaaatcacgaagctctggaaatcaaagcgggcgttatcgaaggaaaagtatcttctgttgaagaagtgaaagctcttgctgaacttccttcacgcgatggcttactttctatgttgcttagcgtacttcaagctccagttcgcaaccttgcacttgcagctaaagcagttgcagaccaaaaggaagaacaaggcgcttaatctgattttaccctaaaataaaacaaatggaggaatttcaaatggctttaaatatcgaagaaatcattgcttccgttaaagaagcaactgtacttgaattgaacgacctagtaaaagcaatcgaagaagaatttggcgtaactgctgctgctcctgtagctgtagctggcggagctgctgctggcggcgctgctgaagagcaaagcgaattcgaccttatccttgctggtgcaggttctcagaaaatcaaagttatcaaagttgttcgtgaaatcactggtcttggcttgaaagaagctaaagaacttgttgacaacactccaaaaccacttaaagaaggtattgcgaaagaagaagctgaagagcttaaagctaaacttgaagaagttggcgcttctgtagaagttaagtaatcttcacttgcctgtaggggaagctcgcttttatgaggcgggctttttctttgcttttctttaagtgcaattaaaaaaggaggttctaataatgagtgaacactattattcagaaaaaccttcagttaaaagcgataaacagacatggtcatttacactgcggaacagatcttatacattcacaagtgacagcggcgttttctcgaaaaaggaagttgatttcggttcgcgtgtcttaattgaagcgtttgaagagccggagatcgatggtgacttcctggatgcaggctgcggttacggcccgatcggtctgtcgctcgccggtgcatttacagaccggaccgtgcacatgattgacgtgaatgaaagagccgtagagctgtcaaatgaaaatgcagaaaaaaacggaataaaaaacgttcggatttatcagagtgatttattttcaaatattgattctgctcaaacatttgcttctattattacaaaccccccaatccgcgccggaaaaaaagttgtccatgccatttttgaaaaaagcgctgagcatttaagggcttcaggtgaattgtggatcgttatacagaaaaaacagggcgggccttctgccattgaaaaactgaaggagctttttgacgaagtttctgtggttcaaaaaaagaaaggctattatatcataaaagcaaaaaaagtttgacttgaattttcagctatgttaatattgtaaaatgccaatgtatatattttgcatgatatgctcaaataatcatagtgcatgtataaattatacaaacatggaaatgctaataaaatcggtatttgtttttggatgtggttttcttaattagaaacccttttttcttttgtcttgtaaaagtatttctttatcgtaagagatgcttattacacatataatacgcatgatttgaggggtgaatcagttgacaggtcaactagttcagtatggacgacaccgccagcgcagaagctatgctcgcattagcgaagtgttagaattaccaaatctcattgaaattcaaacctcttcttatcagtggtttcttgatgagggtcttagagagatgtttcaagacatatcaccaattgaggatttcactggtaacctctctctagagttcattgactacagtttaggagatcctaagtatcccgttgaagagtcaaaagaacgtgatgtgacttactcagctccgctaagagtgaaggttcgtttaattaacaaagaaactggagaggtaaaagaccaggatgtcttcatgggtgatttccctattatgacagataccggtacttttatcatcaacggtgcagaacgtgttatcgtatctcagcttgttcggtctccaagtgtatatttcagtggtaaagtagacaaaaacggtaaaaaaggttttaccgcgactgtcattccaaaccgtggcgcatggttagaatacgaaactgatgcgaaagatgttgtgtatgtccgcattgatcgcacacgtaagttgccggttacggttcttttgcgtgctctcggcttcggttccgaccaagagattctcgatctcattggtgagaacgaatatctccgcaatacactggataaggacaacaccgaaaacagtgacaaagcgcttcttgaaatctatgagcgccttcgtcccggagagccgcctacagtagaaaacgcaaaaagcttgctggattcccgtttcttcgatccgaagcgatacgaccttgcgaatgtaggacgctataaaattaataaaaagcttcatatcaagaaccgcctgtttaaccagcgccttgcagaaacactggtggatccggaaaccggtgaaattctcgctgaaaaagggcagattcttgacagaagaacacttgataaagtattgccatacttagaaaatggaatcggcttcagaaaactttatcctaacggcggcgttgtcgaggatgaagtgatgcttcaatccattaaaatctatgctcctactgatgcagaaggagagcagacgatcaatgtgatcggcaatgcttacatcgaagaggcgattaaaaacattacgcctgctgatattatttcttctatcagctacttcttcaacctcctgcacggagtgggcgacactgatgatatcgaccatctcggaaaccgccgtctgcgttctgtaggtgagctcctgcaaaaccaattccgtatcggtttaagccggatggaacgtgtcgtacgtgaaagaatgtctattcaagacacgaatacaattacgccgcagcagctgattaacatcagacctgttattgcgtctattaaagagttcttcggaagctcacagctttctcaattcatggatcagacgaacccgcttgctgaattgacgcacaaacgccgtctgtcagctctcggaccgggcggtttgacgcgtgagcgcgcaggtatggaagtacgtgacgttcactactctcactacggccgtatgtgtccgattgaaacgcctgagggcccgaacatcggtttgatcaactcattgtcatcatttgcgaaagtaaaccgctttggtttcattgagacgccataccgccgcgttgatcctgaaacaggaaaagtaacgcctagaatcgactacctgactgctgatgaagaggataactatgtcgtagcccaagcgaatgctaagctgagcgatgacggttctttcttggatgacagcatcgtagcgcgtttcagaggggaaaacaccgttgtagcccgcaaccgcgtggattacatggacgtatctcctaaacaggttgtttctgctgcgacagcatgtattccgttcttggaaaacgatgactcgaaccgcgccctcatgggagcgaacatgcagcgtcaggctgtgcctttgatgcagccggaagctccgatcgtcggaacgggtatggaatacgtatccggtaaagactccggtgcagccgttatttgtaaacaccctggtatcgtagaacgggtggaagcgaaaaacgtatgggtgcgccgctatgaagaaattgacggccaaaaagtaaaaggcaacctggataagtacagcttgctgaaatttgtccgctccaaccaaggtacgtgctacaaccagcgtccgattgtaagtgtcggcgatgaagtagtcaaaggagaaatccttgctgacggaccttcaatggagcttggtgaacttgctctcggccgcaacgtaatggtcggcttcatgacatgggacggttacaactatgaggatgccatcatcatgagtgaacgccttgtgaaagatgatgtatacacatctattcacattgaagaatatgaatcagaagcacgtgatacaaagcttgggccggaagagatcacccgcgatattccaaacgtaggggaagacgcgcttcgcaaccttgatgaccgcggaattatccgtatcggcgcggaagtcaacgacggagaccttctcgtaggtaaagtaacgcctaaaggtgtaactgagcttacggctgaagaacgccttcttcatgcgatctttggagaaaaagcgcgtgaagtccgtgatacttctctccgtgtgcctcacggcggcggcggaattatccacgacgtaaaagtcttcaaccgtgaagacggcgacgaacttcctccgggagtgaaccagcttgtacgcgtatatatcgttcagaaacgtaagatttctgaaggtgataaaatggccggacgtcacggaaataaaggggttatctcgaagattcttcctgaagaagatatgccttaccttcctgacggcacgccgatcgatatcatgcttaacccgctgggtgtaccatcacgtatgaatatcggtcaggtattagaacttcacatgggtatggctgcccgctacctcggcattcacatcgcgtcacctgtatttgacggcgcgcgtgaagaagatgtgtgggaaacacttgaagaagcaggcatgtcaagagacgctaaaacagttctttatgacggccgtacgggagaaccgttcgacaaccgtgtatcagtcggaatcatgtacatgatcaaactggctcacatggttgacgataaacttcatgcccgttctacaggtccttactcacttgttacgcagcagcctctcggcggtaaagcccaattcggcggacagcgtttcggtgagatggaggtttgggcgcttgaagcttacggcgcagcttacacgcttcaagaaatcctgactgtgaagtccgatgacgtggtcggacgtgtgaaaacatatgaagccatcgtcaaaggcgacaatgttccagagcctggtgttccggaatcattcaaagtattgatcaaagagcttcaaagcttaggtatggacgtaaaaatcctctcaggcgatgaagaagaaatagaaatgagagatctagaagacgaggaagatgcgaaacaggctgacggccttgcattatcaggtgatgaagcgccggaagaaacagcatctccagacgttgaacgtgacgcagtaacgaaagaatagtctctgattgataaaggcaagtgacatcggttaatccgaagataaaaagggaggtaggccccttgctagatgtgaacaattttgagtatatgaacatcggtcttgcttcaccggataaaatccgttcatggtcttttggtgaagtgaaaaagcctgaaacgataaactatcgtacgttgaaacctgaaaaggacggcctgttctgcgaacgcattttcggaccgactaaggactgggaatgtcattgcggcaagtacaagcgggttcgttataaaggcgtagtttgtgaccgttgcggagttgaagtaacgcgggctaaagtccgtcgtgagagaatggggcatattgaactggctgccccggtttctcacatttggtatttcaaaggtattccgagccgtatgggtcttgtattggatatgtcaccgcgtgcgctggaagaagttatttactttgcttcttacgtcgtaactgacccggccaatacaccgctcgaaaagaaacagcttttatctgaaaaggaataccgtgcgtatctggataagtacggaaacaaattccaagcctctatgggtgcggaagccattaataaacttctgcaggacatcgaccttgtcaaagaagttgatatgttaaaagaagagctgaagacttctcaaggacagcgccgtacacgcgcgatcaaacgccttgaagtgcttgaagccttccgtaattcaggaaacaagccgtcttggatgattctcgacgtgcttccggttattccgcctgaattaagaccgatggttcagcttgacggcggacgtttcgcaacgtctgacctgaacgacctttaccgtcgtgtcatcaaccgtaataaccgtttaaaacgtctgttagacctcggcgcgccaagcatcatcgttcagaacgaaaaacgtatgcttcaggaagcagtcgacgctctgattgacaacggacgccgcggccgtccggttaccggaccgggtaaccgtccgcttaaatctctttctcacatgctgaaagggaaacaagggcgtttccgtcagaaccttctcggtaaacgtgtagactactcaggccgttccgttatcgtcgtaggtccgcatctgaaaatgtatcagtgcggtttgccgaaggaaatggcgcttgagctcttcaagcctttcgtcatgaaagagcttgttgaaaaaggccttgctcacaatatcaagagcgcaaaacgcaaaatcgaacgcgtgcagcctgaagtatgggatgtacttgaatctgtcattaaggagcatccggtcttactgaaccgtgcccctactcttcacagattaggtatccaggctttcgaaccgacgcttgttgaaggacgcgccatccgtcttcacccgttagtatgtacagcttataacgctgactttgacggtgaccaaatggcggttcacgtacctttatcagctgaggctcaagctgaggcgcgcattctgatgcttgcggcccaaaacatcttgaaccctaaagatggtaaaccggttgttacgccgtctcaggatatggtattaggaaactactacctgacgcttgagcgcgccggagcagtcggcgagggtatggttttcaaaaatacggacgaagcgcttcttgcttatcaaaacggttatgttcatcttcatacgagagtagctgttgcagcgaactcccttaagaatgtgacatttactgaagaacagcgttcaaaattgttaattacaactgtcggtaagctcgtcttcaatgaaattcttccggaatcattcccttacatgaatgaaccaacgaagagcaacattgaagagaagacacctgaccgtttcttcttagataaaggtgctgacgtaaaagctgtgattgctgagcagccgatcaacgcaccgtttaaaaaaggtattttgggtaaaatcatcgcggaaatctttaaacgattccatatcacggaaacgtctaaaatgcttgaccgcatgaaaaacctcggtttcagatattcaacgaaagccggcatcacagtaggggtttctgatatcgtcgttctcgatgataaacaggaaatccttgaagaagcacaaagcaaagtagataatgttctgaaacagttcagacgcggtttaatcaccgaagaagaacgttatgaaagagtcatttcaatttggagttcagcgaaagatgttatccaaggcaaactgatgaaatcattagacgaagtcaacccgatctacatgatgagtgattcaggagcccgtggtaacgcatctaactttacacagcttgcgggtatgcgcggtctgatggccaacccggctggacgaatcattgaattgccgattaaatcaagtttccgtgaaggtctgacagtattggagtactttatctccactcacggtgcgcgtaaaggtcttgccgataccgccctgaaaacagctgactcaggttaccttacacgccgtcttgttgatgttgcgcaggatgttatcattcgtgaaacagattgcggaacagaccgcggtattcttgcaaaaccgctcaaagaaggcacggaaatcatcgagcgtctggaagagcgtctgatcggacgtttcgccagaaaacagatcaaacatcctgaaacgggtgctgtgctcattaacgaaaatgaattgatcgatgaagataaagcgctggaaatcgttgaagccggaatcgaagaagtgtggatccgttctgcgttcacatgtaacactcctcatggtgtatgtaaacgatgctacggacgaaaccttgcaaccggaactgatgttgaagtcggcgaagcagtaggtattatcgccgctcaatctatcggtgagcctggaacacagttaacgatgcgtacgttccacacaggcggggttgccggagacgatatcacacaaggtcttccgcgtatccaggagcttttcgaagcgcgtaatccgaaaggtcaagcgacgatttctgagattgacggtacaattgccgaaatcaatgaagtccgcgacaaacagcaggagattgttgttcagggtgctgttgagacccgttcatacacggcaccttacaactcacgcctgaaagtgactgagggtgatcagattacccgcggtcaagtgctgacggaaggttcaatcgatccgaaagaacttcttaaagttactgacctgacaacggttcaggaatatcttctgcatgaggttcagaaggtttaccgtatgcagggggttgaaatcggcgataaacacgtagaagtaatggttcgccagatgcttcgcaaagtccgtgtaatcgatgccggagatactgatgttctccctggcacattgcttgatattcaccaatttacagaagcgaacaaaaaagtgctgcttgaaggcaatcgacctgctacaggccgtcctgtccttctcggtatcacgaaagcttcacttgagacggattcattcttgtctgccgcatcattccaggaaacaacacgcgttcttacagatgctgcgattaaaggcaagcgtgatgaacttctcggcctgaaagagaatgtcatcatcggtaaactggttccggccggtacaggtatgatgaattacagaaaagtaaaacctgtttcaaacgttcagccttcggaagatatggttccggctgaataacagaaactgctgcaggaaaggctgtttcgacagcttttcctcagtattacaattattctggcggggactgcactaaaaaatgtcatacgttgttgacatccgtcccgcagagtgataatataaccaaggtgctcgaaataaaacctgttactttggaggatatgtttatgtcttatgataaagtatcacaggccaaatcaattattattggtacgaagcaaacagtgaaagctctaaaacgaggttcagtgaaggaagtcgtcgtggcaaaagacgcggattcagttcttacggctggcgttatccagcttgcaaagaaccaaaataccgctgtctgtatggtggattccatgaaaaagctcggcaaagcctgcggaattgaagtgggagcagcagctgttgccattatgttatagcgtactttttgtttttatataagatatcaatcttatgtaaagacattgtttttttgcctaatgatgaaccacctgggtatgtgggttataaaacgtaatgaagggaggaacacaacatgcctacaattaatcagctaattcgcaagggacgcgtgagcaaagttgaaaactctaagtcacctgcactaaacaaaggatacaacagctttaaaaaagagcacactaacgtatcttctccacaaaaacgcggggtatgtactcgtgtcggtacaatgacaccgaaaaaaccgaactcagcacttcgtaaatatgctcgtgttcgtttgactaacggaatcgaggttactgcctacattcctggtatcggtcacaacctgcaagagcacagcgttgtactgatccgcggcggacgtgtaaaagacttaccgggggtacgctaccacatcgttcgtggcgcgcttgatactgccggagttgaaaaccgtgcgcaaggccgttctaaatacggtacgaaacgtcctaaagcaaagtaataataataaatcattaaaactatgaagggaggatattcagatgccacgtaaaggtcctgtagcaaaaagagatgttttacctgatccgctttacaactctaagctggtatcccgcctgatcaacaaaatgatgatcgacggtaaaaaaggtaaatctcaaacaatcctatacaagtcattcgatatcattaaagaacgcactggcaatgatgcaatggaggttttcgaacaagcattgaaaaacatcatgcctgtacttgaagtaaaagcacgccgtgtaggtggagctaactaccaagtgcctgtagaagttcgtcctgaacgccgtacaactcttggtcttcgctggttggttaactatgcgcgtcttcgcggagaaaaaacaatggaagagcgcctggctaacgaaattcttgatgcagctaacaacactggtgctgccgttaagaaacgtgaagacactcacaagatggcagaagcgaacaaagcatttgctcactaccgctggtaggattcatataatcaaaataataattccctaataaggaaggagaaattacccaatggcaagagagttctccttagaaaaaactcgtaatatcgggatcatggctcacatcgatgccggtaaaacgactactacagaacggatcttgttctacacaggccgtatccacaaaattggcgaaactcacgaaggtgcttcgcaaatggactggatggagcaggaacaagagcgcggtatcacaatcacttctgcagcaacgactgcacagtggaaaggttaccgtgtaaacatcatcgatacaccgggacacgtagacttcacagttgaagttgaacgttcactccgtgtacttgatggtgcggttgccgtacttgatgctcaatcaggtgttgagcctcagacagaaacagtatggcgccaagcaacaacttacggagtaccgcgcgttgtatttgtcaacaaaatggacaaaatcggcgcagacttcctttactctgtaggcactttaagagaccgtcttcaagctaacgctcacgcaattcaattgccgatcggcgctgaagacaacttcgaaggtatcatcgacttagtagaaaacgttgcgtatttctacgaagatgaccttggaactcgttcagatgcgaaagaaatccctgaagagtacaaagagcaagctgaagagcttcgcagcagcctgattgaagctgtagctgagcttgatgaagagcttatggaaaagtaccttgaaggtgaagaaatcactatccctgaactgaaagctgctatccgtaaaggtacactgaatgttgaattctaccctgtacttgttggttctgctttcaaaaacaaaggtgttcagcttgtacttgatgctgttcttgactaccttcctgcgccaactgatgttgctgcaatcaaaggtgttcgtcctgatacagatgaagagatcgttcgtcattcttctgatgaagagccgttctctgcacttgcatttaaagttatgactgacccttatgtcggtaagctgacattcttccgcgtatattccggtacacttgattccggttcatatgtaaagaactctacaaaaggcaagcgtgagcgcgtaggacgtatccttcaaatgcacgctaacagccgtgaagagatctctactgtttacgctggagacatcgcagctgctgtaggtctaaaagatacttctactggagatactctgtgtgatgaaaaggatcttgtaatccttgaatcaatggaattcccagagcctgttatcgacgtagcgattgagcctaaatcaaaagctgaccaagataaaatgggtatcgctttagcgaaacttgctgaagaagatcctacattccgtacacaaactaaccctgaaacgggtcaaacaatcatctctggtatgggtgagcttcaccttgatatcattgttgatcgtatgaagcgtgagttcaaagttgaagctaacgttggtgctcctcaagttgcgtaccgtgagacattccgtaccggtgcaaaagttgaaggtaaattcgtacgtcaatcaggcggacgcggtcagttcggtcacgtttggatcgaatttgaaccgaacgaagaaggcgctggctttgaattcgaaaacgcaatcgtcggtggtgttgttcctcgtgaatacatcccagccgtacaagcaggtcttgaagactctcttgaaaatggtgtcctagccggattcccgctaatcgacatcaaggcgaaactttttgatggatcttaccatgatgttgactcaaacgaaatggcgtttaaagtcgctgcttctatggcattgaaaaatgcagtcagcaaatgtaacccagttcttcttgaaccaatcatgaaagttgaagttgttattcctgaagaatacatgggagacatcatgggtgatgttacttctcgtcgcggacgcgtagaaggtatggaagctcgcggtaacgctcaagttgtgcgtgcgatggtacctcttgctgaaatgttcggttacgctactgcccttcgttctaacacgcaaggacgcggtacgttcacaatgttcatggatcactacgaagaagtgccgaagagcatcgctgaagaaattatcaaaaaaaataaaggcgaataattgattttgccacttaactcaagtataactactattgtaagatgaggaagtgagagcttgctttcactttctatcactctatacattactaattaaaagctcttaaggaggattttagaatggctaaagaaaaattcgaccgttccaaatcacatgccaatatcggtacaattggacacgttgaccatggtaaaacaacattaactgctgctatctcaacagtacttcataagaaatctggtaaaggtacagctatggcgtacgatcaaattgatggtgctccagaagaacgtgagcgcggtatcacaatctctactgcacacgttgagtacgaaactgacactcgtcactatgcacacgttgactgcccaggacacgctgactatgttaaaaacatgatcactggtgctgcgcaaatggacggagctatccttgtagtatctgctgctgatggcccaatgccacaaactcgtgagcacatccttctttctaaaaacgttggtgtaccatacatcgtagtattccttaacaaatgcgacatggtagacgacgaagagcttcttgagcttgttgaaatggaagttcgcgatcttcttagcgaatacgacttccctggtgatgatgtaccagttgttaaaggttctgctcttaaagctcttgaaggcgatgctgagtacgaagaaaaaattcttgaacttatggctgcagttgatgagtacatcccaactccagaacgcgacactgaaaaaccattcatgatgccagttgaggacgtattctcaatcactggtcgtggtacagttgctactggccgtgtagaacgcggacaagttaaagtcggtgacgaagttgaaatcatcggtcttcaagaagaaaacagcaaaacaactgttacaggtgttgaaatgttccgtaagcttcttgactacgctgaagctggagacaacatcggtgcacttcttcgcggtgtagctcgtgaagacatccaacgtggacaagtacttgctaaaccaggtacaatcactccacacagcaaattcaaagctgaagtttacgttctttctaaagaagagggtggacgtcatactccattcttctctaactaccgtcctcagttctacttccgtacaactgacgtaactggtatcatcaatcttccagaaggcgtagaaatggttatgcctggagataacactgaaatgatcgttgaacttatctctacaatcgctatcgaagaaggaactcgtttctctattcgtgaaggcggacgtacagttggttcaggcgttgtttctacaatcactgagtaatcgactcgttcaataatgcggggtcccttatggggcctcgtttttttgtttccctgctgattccatgtataatagaacgtatacaaattttaggagcagaccgatgaacgataacttcaagaaaaccaatcgtatttcaatgcttcagcaattgcagattaatggcagtgaacaaaccattatgattaatggtgatgacaggagtagtccgctgcttttgtttttgcatggcggtcccggcacgcctcaaatcggttatgcgagaaaataccagaatgagctggaaaagcatttcaccgttgtgaactgggatcagagaggggcgggtctctcttattcaaaggaaattccgggttcatctatgactttggatcagctgacagctgacaccattcatctgaccgaacgcttatgcaagcaattcagcaggagaaaaatatatatcgccggctattcgtggggttcagttttggcgcttcaagttcttcaagagaaacctgatttgtattatgcgtatatcggtatcagtcaggtggttaatattcaaaaggaagaaacggaagcctaccggttgatgatggaatggagcaggcaacacaaacatatcctgctgggcaagacgctgagctttatcggagcaccccatgggagaaacagctgcagcgaacgctgtttctgctttgtattgaaatgaggggagggggctttacccatcatccgatcggcgctcttaaagcaggggggcgaatgctgtttggtgaaccgtacggtgtgagagggagcttcttagccgcgcggggacaaatgttcagcctgaaacacctgtgggaggatctcatttcctttgatgcaggggaatcagtttcttctattgtaataccgtgctgttttatgtcagggagatacgatttgacggttccggggacgacgtcttatgaatattatcagaaggttgatgcgccgtataaagaatggcattggtttgagaactcagcccattcgcctcacttggaggaaccggatcgctttgccgaagttgtcagccggttcgcatcgttccatctctgaaagaaaacagtcatatccttgattaatcatggtatcacctgtataataatcaaagtgtgaaaaccacaaggttctttaaataaaccttgcaacatgcgtctattttctgtataatagtgtatgttggtctttgactgcgatgaagtgagaggttgctgacacacccggccgctttgccatggcaaggtgatcaggtttttctcacggagaactgtctaacgtgatgtaggcgaaaaggagggaaaataatggcaaaacaaaaaattcgtattcgtttaaaagcatatgatcatagaatccttgatcaatctgcagagaagattgttgaaacggcaaaacgttctggtgccagcgtatctggtccgattccgttgccgactgaaaaatcagtttacacaatccttcgtgcggtgcacaaatacaaagattctcgtgagcaatttgaaatgcgtacacataaacgtttaatcgacattgtgaacccaacaccacaaactgttgatgctctcatgcgattagacttaccatctggtgtcgatatcgaaatcaaactttaattctaaaatatagaatgatcttaataggaggtgtgacgaatgaccaaaggaatcttaggaagaaaaattggtatgacgcaagtattcgcagagaacggtgatcttatcccggtaactgttattgaagcagctccaaacgttgttcttcaaaagaaaacagctgaaaatgatggctatgaagcgatccagcttggttttgacgataagcgcgaaaagctttcaaacaaaccggaaaaaggacacgttgcaaaagcggaaactgctcctaagcgcttcgttaaagaattacgcggcgtggatatggatgcgtatgaaattggtcaggaagtcaaggttgaaattttctctgcaggagaaatcgtagatgtaacaggagtatctaaaggtaaaggtttccaaggtgcaatcaagcgccacggacaatctcgcggacctatgtctcacggttcacgctaccaccgtcgtcctggttcaatgggacctgtagatcctaaccgtgtattcaaaggtaaactattacctggacgcatgggcggagatcaaatcactgtccaaaaccttgaagtcgtaaaagtagatgctgagcgcaatcttcttttgattaaaggtaacgtacctggtgcgagaaaagctttaatcactgttaaaagtgctgttaaatctaaataagtctcttaggaaaggaggaaattgatcatgccaaaagtagcattatacaaccaaaacggttctactgctggtgatatcgaattaaacgcttctgtatttggaattgagccaaatgagagcgtagtattcgacgctattcttatgcaaagagcttccttacgtcaaggatctcacaaagtaaaaaatcgttctgaagtacgcggcggaggtcgcaaaccatggcgtcaaaaaggtacaggtcgtgcccgtcaaggttcaatccgttcaccgcaatggcgcggaggtggtgtcgtattcggcccaacaccacgcagctattcttacaaattacctaaaaaagttcgccgcttggcaatcaaatcagtattgtcttctaaagtgaacgacaacaacattattgttcttgaagatcttactcttgatacggttaaaacaaaagaaatggcagctgtccttaaaggattatctgttgagaaaaaagctttaatcgtaactgcggatgcaaacgaagcagtatctctttctgcacgcaacatccctggagttacagttgttcaagctaacggaatcaacgtgttagacgttgtcaaccacgagaagcttctgattacaaaagctgcggttgaaaaagtagaggaggtgcttgcataatgaaagatcctcgtgatgttcttaagcgccccgtcattactgaacgttctgctgatttaatgactgaaaagaaatatacttttgaagttgatgtaagagctaataaaacagaagtgaaagatgcagttgaaagtatctttggagtgaaagttgacaaagtcaacatcatgaactacaaagggaaatcaaaacgtgtcggccgctatactggtatgactagccgtcgcagaaaagcgatcgtaaaacttactgcagacagcaaagaaatcgaaatttttgaagcttaattatctgtaaaaagaaggagggaaattcaaaatggcgattaaaaagtataaaccgacctctaacggacgtcgtggcatgacaacttcagattttgctgaaatcacgactgaccagccggaaaaatccttgcttgcgccccttcacaaaaaaggcggacgtaacaaccaaggtaaattgactgtacgtcaccaaggtggcggacacaaacgccaataccgtgttatcgacttcaaacgcgataaagatggtatacctggacgcgttgctacagttgagtacgatccaaaccgttcagctaacattgcactaatcaactatgtagacggagaaaaacgttacattcttgctccaaaaggaattcaagtaggtactgaaatcatgtccggccctgaagctgacatcaaagtaggtaacgcacttccgcttatcaacatccctgttggtacagttgtgcataacattgaattaaaacctggtaaaggcggacagcttgtacgttcagctggtacatctgctcaggttcttggtaaagaaggcaaatacgttcttgtacgtcttaactctggtgaagttcgcatgatcctttctgcttgccgcgcttctatcggtcaagtaggtaacgagcagcacgaacttatcaacgttggtaaagcaggacgctctcgctggaaaggcatccgccctacagtccgcggttctgtaatgaaccctaacgatcacccgcacggtggtggtgaaggtcgcgcgccaatcggacgtaaatcaccaatgtctccttggggcaaaccgactcttggattcaagacacgtaagaaaaagaacaaatctgataaatttatcgtacgtcgtcgtaaaaataaataacggggttgtctacggttcatttcggaccgtagtgcaatcacgaagggaggttccaaaatggctcgcagcttgaaaaaaggaccatttgtcgatggacacttgatgacaaaaatcgagaaattaaatgaaacggacaagaaacaagttgtaaaaacttggtctcgccgttcaactattttcccacaatttatcggtcacactatcgcagtatatgacggacgtaaacacgtgcctgtattcatttctgaagacatggtaggccacaagttgggcgaattcgcaccgactcgtacttacaaaggccacgccagtgacgataaaaaaacaagacgctaagagaggaggcttttaaatgcaagctaaagctgttgcaagaacagtccgtattgctcctcgtaaagcacgtctagtaatggacctgattcgaggtaagcaagtaggcgaagcagtatctatcttgaacctaactccgagagctgcttctccgatcatcgaaaaagttttaaaatctgctatcgcaaatgctgagcacaactacgagatggacgctaacaatctggttatttctcaggcatttgttgacgaaggcccaacgttaaaaagattccgcccgcgtgctatgggacgtgcgagccaaatcaacaaacgtacgagccacattacaatcgttgtatcagaaaagaaggagggataagtagtgggtcaaaaggtaaatccagtcggtcttcgtatcggagtcattcgtgattgggaatctaagtggtacgctggtaaagattacgctgacttcctgcacgaagatttaaaaattcgtgaattcattagcaaacgcctttctgacgcttctgtttctaaagtagaaatcgagcgtgcagcaaaccgcgttaacattacgatccacactgctaagcctggtatggtaatcggtaaaggcggatctgaagttgaagcacttcgtaaagcccttaacagccttactggcaagcgtgtacacattaacattcttgaaatcaaaagagcagatcttgatgctcagcttgtagctgacaacatcgctcgtcaactagaaaaccgtatttctttccgccgtgcgcagaaacaacaaatccaacgcactatgcgtgctggagcacaaggtgtgaaaacaatggtttccggccgtcttggcggagctgatatcgctcgttctgaatactacagtgaaggaactgttccattgcacactttacgtgctgacatcgactatgcaacatctgaagctgacacaacttacggtaagcttggtgtaaaagtctggatctatcgtggagaggttcttcctactaagaagaaaactgaggaaggaggaaaataatatgttattaccaaaacgcgttaaatatcgcagagagcatcgcggaaaaatgcgcggtcgcgctaaaggcggtactgaagtacattttggtgagtacggtatccaggctcttgaagcttcttggatcacgaaccgccaaatcgaagctgcacgtattgcgatgactcgttacatgaaacgtggcggtaaagtttggattaaaattttcccttcaaaaccttacactgctaaaccgcttgaggtacggatgggttccggtaaaggggctcctgaaggctgggtagctgttgtaaaaccgggcaaagttttatttgaaatttctggtgtgtctgaagaggtagctcgtgaagctctccgtcttgcatctcacaaattgccaattaaaacgaagttcgtaaaacgtgaagaaattggtggtgaatcaaatgaaagctaatgaaattcgtgaccttaccactgctgaaattgaacaaaaagtaaagtctcttaaagaagaacttttcaatcttcgctttcaattagcgacaggacaacttgaaaatactgctcgcattcgtgaagtgcgcaaagctatcgcgcgcatgaaaactgtgattcgtgaaagagaaattgctgccaacaaataatcactgaggggaggtcgtgagcatgagcgaacgtaaccaacgcaaagtttaccaaggccgtgttgtttctgacaaaatggataaaaccatcactgttgttgttgaaacatacaaaaaggatcctatttacggtaaacgcgtaaaatactcaaagaaattcaaagcacatgatgaaaataaccaagctaaaatcggagacatcgtaaagatcatggaaactcgtccattatctgcaactaagcgttttcgtctagtagaagttgtcgaagaagctgttattatctaataaagttcggaattctttttccgaagggaggtaacaaataatgattcaacaagagactcgtttaaaagttgctgacaactccggtgcgcgtgaggtacttactattaaagttcttggcggttctggacgtaaaacggctaacattggtgatgtaattgtttgcacggttaaacaagcaacaccaggaggcgttgtcaaaaaaggtgaagtcgtaagagctgttatcgttcgcacaaaaagcggagcacgcagatctgacggatcatacatcagcttcgatgagaatgcatgtgttatcatccgtgacgacaagagcccgcgtggaactcgtatcttcggaccggttgcccgtgaattacgtgaaaacaacttcatgaaaattgtttctctggctccagaagttatctaatgaaataaatgccttactcaaggaggtgcgatcaggatgcatgtgaaaaaaggcgataaagtaatggttatctctggtaaagataaaggcaaacaaggtacgatccttgctgctttccctaaaaaggaccgcgttctagttgagggcgtaaacatggtgaagaagcactctaaaccaactcaagcaaaccctcaaggcggtatttctaatcaagaggcgccaattcatgtatcaaacgttatgccgctcgatcctaaaactggtgaagtgactcgcgtaggatacaaagtggaagatggcaaaaaagttcgtgttgcaaaaaaatctgggcaagtcttagataaatagtatttaaaggaagggaggtctatctcatgaaccgccttaaagaaaagtacaataaagaaatttcacctgctttaatgacgaagttcaactacgactctgttatgcaggtgccaaaaatcgaaaaaatcgtaatcaacatgggtgtcggtgatgctgttcaaaacgcaaaagcaatcgacagtgctgttgaagaattaacgtttatcgcaggtcaaaaacctgtcgttactcgtgcgaagaaatcaattgctggattccgtcttcgtgagggaatgcctatcggtgcgaaagtaactcttcgcggagagcgcatgtatgatttccttgataaacttatttctgtatctttaccgcgtgtacgtgacttccgcgggatttctaagaaatctttcgacggtcgcggaaactacactcttggtatcaaagaacagttaatcttccctgaaattgactacgataaagtaacaaaggttcgcggaatggacatcgttatcgtaacgactgctaactctgacgaagaggctcgtgagctattaactcaagtaggtatgccgttccagaaataatcaatgaaagggaggcgaaatcgtggctaaaaagtcaatgattgcgaaacaacaacgtacaccaaagtttaaagtgcaagagtacactcgctgtgaacgctgcggacgtccgcactcagtcattcgtaaatttaaactttgccgtatttgtttccgtgagcttgcatataaaggacaaattcctggcgtgaaaaaagccagctggtaatccccaagaatgggaaggaggtaattatataatggttatgacagatccaattgcagatatgctgactcgtattcgcaatgcaaacatggtacgtcatgagaagcttgaaattcctgcttctaaattgaaaagagaaattgctgacattttaaagcgtgaaggtttcattcgtgacgttgagttcgtagaagacagcaaacaaggtatcatccgcgttttcttgaaatacggacaaaacaacgagcgcgttatcactggtcttaaaagaatcagcaaaccaggtttgcgtgtatacgctaaatcaaatgaagtacctcgcgtacttaacggtcttggaatcgcgattatttctacatcacaaggtgttttaacggacaaagaagcccgtgcaaaacaagctggtggagaagttctagcatacgtttggtaagaagtttaacaagaatggaggtgttttagtatgtctcgtgtaggtaaaaaactgcttgagatcccttctggagttacagtaacgctgaacgaaggcaacactgtagctgtaaaaggaccaaaaggagaattaactcgtactttccatcctgatatggaaatcaaaattgaggacaacgtgcttacagttactcgtccttctgatcacaaagagcaccgtgcgctgcatggtacgactcgcagtctgcttggaaacatggttgaaggcgtatctaaaggatttgaaagaggtttggaattagtcggtgtcggttatcgtgcggctaaatccggaaacaaacttgttttaaacgttggatactctcaccctgttgagatcgttcctgaagagggcatcgaaatcgaagttccttctcaaactaaagtagttgtaaaaggtacagacaaagagcgtgtaggagctatcgctgctaacatccgcgctgtacgttctccagagccttacaaaggtaaaggaatccgctacgaaggtgaagttgttcgccgtaaagaaggtaaatctgctaagtaagaccgcttaaagtgaagaaaggagtgacctaaggatgattacgaaaactagcaaaaatgctgctcgtcaaaaaagacatgcccgtgttcgtgctaaactttcaggcacagctgaaagacctcgtctgaatgtgttccgttcaaacaaacacatttatgctcaaatcatcgatgatgtaaatggcgttacacttgctagtgcctctactcttgataaagatttgaacgtggaaagcactggtgacagcgctgctgctgctaaagtcggtgaactcgttgcgaaacgcgcttctgagaaaggtgtttctgacgtagtatttgaccgcggcggatacttataccatggacgtgtaaaagctctggccgatgcagctcgtgaagccggactgaaattttaataaaaaaaggagggacacatgattatgcgtcgtattgacccaagcaaattagagttagaagaacgcttagttacggttaaccgcgtagcgaaagttgttaaaggtggtcgtcgtttccgtttcgcagctctagtcgttgtcggtgacaaaaacggtcacgtaggtttcggtactggtaaagcacaagaagtacctgaagcaatccgcaaagctgttgaagatgcgaaaaagaatttgattgaagtaccaatggttggaactacgattccacacgaaatcatcggacgtttcggtgcaggcaatatcttgttgaaacctgcttctgaaggtactggagttatcgctggaggccctgtacgtgcggtacttgagcttgctggcgttgctgatatcctttctaagtctttaggttctaacacaccgatcaacatgatccgtgcaacacttcaaggtttaagtgagcttaaacgtgccgaagaggttgcgaagcttcgtggaaaatctgtagaagaactgttaggataaggagggaacattaatggctaaattagaaattaccctcaaacgcagtgtaatcggtcgcccggaagatcagcgcgttactgtaagaacacttggtttaaagaaaacaaaccaaactgtcgttcatgaagataacgctgcgatccgcggtatgattaataaagtatctcatctagtttctgttaaagaacaataaaaataaattataggctaaggaggtgtcctaatgaaacttcatgaattaaagccttcagaaggttcacgtaaagtacgcaatcgcgtaggtcgtggtattggttctggtaacggtaaaacagctggtaaaggtcacaaaggtcaaaacgctcgttctggcggcggtgtacgccctggattcgaggggggacaaatgcctttattccaacgtcttcctaagcgcggttttacaaacatcaaccgtaaggaatacgctattgtgaacgtagacaaattgaacggttttgcggaaggaacggaagtcactcctgaacttcttcttgagactggtgttattagcaaacttaatgcaggagtaaagattcttggcaacggtaaattagagaaaaaattaactgtaaaagccaataaattctctgcttctgcgaaagaagctgttgaagctgctggcggtacagctgaggtgatctaacttgtttaagacaatctccaactttatgcgtgtgagtgatattcggaataaaatcatttttacattactcatgcttatcgtctttcgcataggtgcgtttatccctgtgccatatgtaaatgctcaggcgttgcagacacaaagttcgatgggggtttttgatctccttaacacatttggcggcggtgcgctttatcagttctccatttttgcgatgggaattacgccttacatcactgcttcgatcatcattcagctgcttcagatggatgttgtgccgaagtttaccgagtggtctaagcaaggtgaagtcggccgccgtaaattagctcagttcacgagatattttacgattgtgcttggttttatccaggcattaggtatgtcttacgggtttaacaacctggcaaacggtatgctgattgaaaaatccggcatatcgacatatctgattattgctttagtactcactggaggaactgcttttttaatgtggctgggagaacaaattacttccaatggagtaggtaacggaatttcgatcatcatcttcgcggggattgtggctagtattccgaaaactgttgggcagatttatgagactcaatttgtcggcagcagcgatcagctgtttattcatattgtgaaaatcgctttactggtgattgcgattttagccgttattgttggtgttattttcattcagcaggctgtacgcaaaatcgcgattcaatatgcaaaagggcaaggtcgttcacctgttggcggaggccagtcaactcaccttccgcttaaagtgaatccggcaggggttattccggtaatctttgcggttgcgttccttattacgccgcgtactatcgcgtcatttttcggagaaaacgatgtgacaaagtggattcaagccaactttgacaatacacatccggtgggcatgacggtttatgtcgcattaattatcgcctttacgtacttctatgcttttgtgcaggtaaaccctgaacaaatggctgataacctaaaaaaacagggtggctatatcccgggggttcgtccagggaaaatgactcaagatagaattacgagcattttgtatcgacttacgtttgtgggttctatattcttagccgtgatttccattcttcctatctttttcattcaattcgctggattgcctcaaagtgcacagattggcggaacatcattgttaattgtcgtcggggtagccttggagacaatgaagcagctggagagccagttagtgaaacgtaattaccgaggatttatgaaaaattagaggactggttttaaccattcctctaaataagagaggacgggggaaatccgaatgaacttagtcttaatgggacttcctggagccggtaaaggcacacagggagaacgaattgttgaggattatgggatacctcatatctcaacgggagatatgttccgtgctgctatgaaagaagaaacaccactcggactcgaagcaaagtcttatattgataaaggcgagctcgtaccggacgaagtcacaatcggcattgtcaaagaaagactcggcaaagatgattgtgaaagaggttttcttctggacggatttccgcgaacagtcgctcaggctgaagctcttgaaaacattcttgaggaatacggcaagccgattgattatgtcattaacattaaagtagacaaagactctttaatggaacgtttgactggacgcagaatttgcagtgtttgcggcacaacctatcatttggttttcaatccgccgaaaacgccgggtgtttgtgataaagacggaggagacctttatcaacgggcagatgataatgaggaaaccgtctcaaaacggcttgaggtcaacatgaagcagactcagcctttactcgatttttattctgagaaagggtatcttgtcaacgtcaatggccagcaggacattaacgacgtgtacaaagatgtgaaagagcttcttggaggattgagcaaatgattatctgtaagacccctcgtgagcttagcatcatgcgggaagcagggcgaatcgtggctttgactcatgaagagatgaaaaagcacattaaaccaggaatctcgacaaaagaattggatcaaattgccgaacgttttattgagaagcagggtgcaatcccatcttttaaggggtataatgggtttcgcgggagcatctgtgtatcagttaatgaagaactcgttcacggaattcccggtaaaagggttttgcgtgacggtgacattatcagcattgatatcggtgctaaattaaatggttatcatggtgactctgcttggacatatccggtaggaaacatcagtgatgatgataaacgactgctggaagtgacagaggagtctttatataaaggcttgaaggaagcaaaaccaggtgaacgtttgtcgaatatttcccacgcaatacaaacgtatgtcgaaaatgagcagttttcagttgttagggagtatgtcggacatggtgttggtcaagacttgcatgaggatccgcaaattcctcattacggtccgccaaacaaaggacctaggctgaagcctggtatggttctcgctatagaaccgatggttaacgctggcagccggtatgtgaaaacattggctgataactggacggttgtaacggtagatgggaaaaagtgtgctcattttgaacatacgattgcgattacggaaacgggttttgatatactgacaaaagtctagatgatgaaatgaattccatgacacatgtttttcattccgcacctgggcagattgtaggtttacaattggtcggaagaaaaaccggctagctgctgtcatcggaaggaagattcatcatcgtgtactaaagcagacggagaaaagcgtacatttcattctccttagaaaaagaatatcaatcattcaccctttatgattgcgtatctccggaagttcagaacagtataaacgaaacagggcgtgtgacaaacggataactgagattttctcttttgaaatttgtcagagagcaagttactgatttgaagaagggagaacacttgaatggcgaaagacgatgtaattgaagtggaaggtacgattgtcgaaacactgccaaacgcgatgttcaaagttgaactcgaaaatggccatacggttttggctcacgtatctggtaaaatccgcatgcacttcattcgcattttacctggagacaaagttacggtagaattatctccatatgacttaactcgtggcaggattacgtaccgttacaaataaagcactccggaaactgaaggaggttggaaacacatgaaagtgagaccatcagttaaaccaatctgcgagaaatgtaaagttattcgcagaaaaggaaaagtaatggtgatctgtgaaaatccaaagcataaacaaaaacaaggataattaataaggaggtgcccagagaatggctcgtattgctggtgtagatatcccacgtgacaaacgtgttgttatttctttaacatatgtcttcggaattggccgcacaacggctcagcaagtcttgaaagaggctggtgtttctgaagatactcgtgtgcgtgatcttactgaagaagaacttggtaaaatccgtgatgttattgacaaactgaaagtagaaggtgaccttcgccgtgaagtttctcttaacatcaagcgtctgatcgaaatcggaagctaccgcggaatccgccatcgcagaggtttgcctgttcgcggacaaaactctaaaaacaatgcgcgtactcgtaaaggtccgcgtcgtactgtagctaacaagaaaaaataagtaagggaggtacctaaacaatggctgctgctcgtaaacaaaacacgcgtaaacgtcgcgtgaaaaagaatattgagtcaggaatcgctcatattcgttcaactttcaacaacacgatcgttacgatcactgatactcatggtaatgctatttcttggtcaagtgccggagctctaggattcagaggttctcgtaaatcgactccttttgctgcgcaaatggctgctgaaacagctgctaaaggttcaatcgaacacggacttaaaactcttgaagtaactgttaaaggaccaggttctggccgtgaagctgcaatccgtgctttacaagctgccggacttgaagttacagctatcagagacgtaactcctgttcctcataatggatgccgtccaccaaaacgtcgccgcgtgtaatttgtttgtatagattttgtgtccctgtcaataatgggttatgatacagttatttatgaaacgaatgcaccgactcgttgcctgagcacatacgggactaaacaatggggaatttcggatggaatctcatatgattctattcgaggtttcgacgttttgaaggagggttttaagtaatgatcgagattgaaaaaccaaaaatcgaaacggttgaaatcagcgacgatgccaaatttggtaagtttgtcgtagagccgcttgagcgtggatatggtacaactctgggtaactccttacgtcgtatcctcttatcctcactccctggtgccgctgtaacatcgatccagatagatggtgtactgcacgaattctcgacaatcgaaggcgttgtggaagatgttacaacgataatcttgcacattaaaaagcttgcattgaaaatctactctgatgaagagaagacgcttgaaattgatgtacagggcgaaggaactgtcacagcagctgatattacacacgacagcgatgttgaaatccttaatccggatcttcatatcgcgactcttggtgagaatgcgagtttccgagttcgccttactgcacaaagaggacgtgggtatacacctgctgattcgaacaaaagagacgatcagccaatcggcgtgattccgatcgattcaatctttacgccagtttctcgtttatcttatcaggtagaaaacactcgtgtaggccaggttgcaaactatgacaaacttacacttgatgtttggactgacggaagcactggaccgaaggaagcaattgctctcggttcaaagattttaactgaacaccttaatatattcgtcggtttaactgacgaagctcagcatgctgaaatcatggttgaaaaagaagaggatcaaaaagaaaaagttcttgaaatgacgattgaggaacttgatctttctgtccgttcttacaactgcttgaagcgtgcgggcattaacacggttcaagaacttgcgaacaagacggaagaagatatgatgaaagttcgcaacctgggacgcaaatcacttgaagaagtgaaagcgaaacttgaagaacttggactcggccttcgcaaagacgattgatctagtttccatgtgaactaggattttcgtgtgttttttaattagaaacagcattccattaaaggaggggacatcacatgtcatacagaaaactaggacgtacgagttcacagcgtaaagctatgcttcgtgatcttacaacagatttgatcatcaacgaaagaattgaaacaactgaaacacgtgcgaaagaacttcgctctgttgttgaaaagatgatcactcttggtaagcgcggtgacttgcatgctcgtcgtcaagctgctgcatacattcgcaacgaggttgctaatgaagaaaataaccaagatgcacttcaaaaattattctctgacattgcaactcgttacgaggagcgccaaggcggatacacacgtattatgaagcttggtcctcgccgtggtgacggtgcaccaatggcaatcatcgaattggtttaatcacatatttttgtgtatctaaagaagggcgggacagtttctaactggatctatgccctttttttagatatcagaactttttatcatgagacagaaaagcagagctatagctgagaggaggtcaggcgcccgtggatcaaaaacagcttatatccgtaaaagacattctattccgctaccgcaaagatgcagtaagaccggcgctggacggtgtgagtctggaggtatatgaaggagaatggcttgctatcgtaggtcacaacggttcagggaagtcgactttggccagagcgctgaacgggctgattttgcctgaggccggagaaattgaagtcggcggcatcaagctgactgaggataccgtgtgggatgtgcgaaaaaaaatagggatggtctttcagaatcccgataaccaatttgtcggaacgactgttcgcgatgatgtggcttttggtttagaaaacaatggtgttccgcgcgaagaaatgattgagagagtagattgggctgtcacacaagtcaatatgcaggattttcttgatcaagagccgcaccatctctccggaggtcaaaaacaaagagtggcgatcgcgggaattattgccgcgcgtcctgatattatgattttggatgaagcgacatccatgcttgacccgattgggagagaagaagtccttgatactgtcagacgcttaaaagatcagggcatggccaccgtcatttcgataacacatgacctggaagaagccgcaagggcggataggatcattgtgatgaacggcggcaggaaatatgcagagggcacgcctgaagagatttttaaattaaatgaagacttggttcgcatcggtcttgatttgcctttctcattccagctcagcctgcttttgaaagaaagcggactggcgttaacgaaaaaccatctgactcaggaagggctggtgaatgagctgtggacattaaaatcaaagatgtagaacaccgctatcaaatgaagacaccgtttgaacggcttgctctgtatgatatcaatgccgtgataaaagagggcagctacgttgccgtcatcggacatacagggtcgggcaaatcgacgctcctgcagcatttaaacggtttgctgaaaccgactaaaggacagcttgagctcgggagcacgattctggcagccggtaaaaagaataaagaccttaagactctgcgaaaaaaagtcggaatcgttttccaatttcccgaacatcagctgtttgaagagactgtgctgaaggacatcgcattcggaccgatgaatttcggtgtaaaaaaagaagacgctgaacggaaagcaaaagaaatgctggggcttgtgggccttccggaagacattttggatcgttcaccgtttgagctcagcggcggccagatgcgcagagtggcgattgccggcgttctcgcgatggagccggaagtgctggttttggatgaaccgacagccggtcttgatccgagagggcgccaggacattatggacatgttctatgcgcttcatcagcggggaaacctgactaccgttctcgtcacccacagcatggaggacgccgcccgctatgctgacgaaatgatcgtcatgcacaaaggcaccattaaagcgacggggagtccgcgtgacttgtttgtaaaaggtgaagagatggccgaaatgggactggatcttcctgagtcggtgaagtttcagagacggcttgaggaggctctcggagttaagtatgaaaaacccatgctgaccctgcaggatgccgcgagcgaaattaaggctttctttcaggaggaaaaggaccaatgatggacagcatgattatcggaaagtatgttcccggatcatcgcttattcaccgattggacccgcgaacaaaacttgtcagcatctttctttttgtatgtatcgtttttttggcaaacaacgtacaaacgtatgctttgctcggtttgtttacattcggggtgatcgccttaacacgagtgccgttcagctttttgctgaaagggcttaagccgattatctggattgtggcgtttacctttttattacacattttcatgacgcatgaaggatctgtcatttttcagcttggctggtttaaagtgtatgagggcggacttatacaggggatttttatctccctccgtttcgtttaccttatctttatgacaacgctgctgacgctgacaacaacgccgattgaaatcacggatggaatggagcagctcttgaatccttttaaaaaggtgaagctgcccgtacacgaactcgcattgatgatgtcgatatcattgcgatttatcccgacattgatggaagagacagataaaatcatgaaggcgcaaatggcgaggggtgcggactttacaagcggcccggtgaaagacagaatcaaagcggttgttccgctgcttgtcccgctgtttgtcagcgcctttaaacgcgcggaagagcttgcggtcgccatggaggcgagaggctaccagggcggtgaggggagaacgaaatacagaaagctcgtctggaccggaaaggataccggagccattctgctcatcatcgtattagccgtgttattgtttttcttaagaagttagaggtgctgctgaatgagagtgaaatgtaccattgcttatgacgggcatttatttaacggatatcaggttcagcctggaaagcggaccgttcaaagtgaattggaaaaagcgctggccgtcatccataaaacggacggcagggtgcctgtcatctcatcgggccgcacggacagcgatgttcatgctgccgggcaggttattcattttgatacgccgctgtccatcccggctgagaaatggccgtttgcgctcaatgccctgctgcctgatgatattgccgtcaaaacagcagagattgcggatgatgggttccatgcacgatttagcgcagtccaaaaggaatatcgctactttgtatatacggagaaacacccggacgtatttaaacgacattacgcttaccattttgcatatcagcttaatgtgcagaaaatgagggaagcttcaaggcacctcatcgggacacatgatttcacaagcttttgcgcggctgataccgcggttcaggataaggtcagaacgatttacgagctggattggactgagaccggagacggcctgcagatgcggatcaccggaaacggttttctctataatatggtcagaatcattgccggaacgttattggatacaggagctggaaaattttctcccgatgatgtaaaagcaatgctcgaagcgaaggatcgcgaagccgcggggcgcaccgcaccggggcacgggctgtatttatggagcgtttgctatgacaactaaaccaggtgtaacattttcttgacagagtctgcataaagttataagatatcatatggtatgtatttcaaccccacgataagccccggaacttattgtgttgtgaaatagaacgtaacagaagtttatgaaaaaatgacagatcatttaggagggaattaaatgcgtacaacacctatggctaacgcaagtactattgaacgcaagtggttagttgttgatgcagcaggcaagactttaggacgtctttctacagaagttgcatctatccttcgcgggaaacacaaaccgacttacacaccgcacgttgatactggagatcatgtgatcatcatcaacgctgaaaaaatcgagttaactggtaaaaagttaactgataaaatctactaccgtcacacaatgcacccaggcggtctgaaatcaagaacagctcttgaaatgcgtacaaactaccctgagaaaatgcttgagcttgctatcaaaggcatgcttccaaaaggttctctaggtcgtcaaatgttcaagaaattgaacgtataccgtggttctgagcatccacatgaagcacaaaaacctgaagtttacgaacttcgcggttaattaaaaaggaggttaccaatttggcacaggttcaatattacggtactggccgtcgtaaaagttctgtagcgcgtgtgcgcttagttccaggagaaggtcgtatcgtcgttaataatcgtgaaatcagcgagcacattccatctccggctctaatcgaagatatcaaacaaccattaactttaactgaaacagctggtacttatgatgttttagtaaacgtacatggaggcggcttatctggtcaagctggagcaatccgtcacggtatcgctcgtgctttgcttgaagcagatccagaataccgcgcaacacttaaacgtgctggtcttctgactcgtgacgcccgtatgaaagaacgtaaaaaatacggtcttaaaggcgctcgtcgtgcacctcagttctcaaaacgttaatcgttttggatggcaaaaaccacaacttcttggttgtggtttttttgtatttttttctcatatcgaagaggttatccgatgtttttctagaattgtttgttatactctattcattaccaataaggagcgcagttataatgaataagttagtcatacataacagcaaggcatgggataaaaaagtcgaaacaggcaatgaatggacggttgcggttgattctcatacaattggtgaagcgaaaaaaggcaattggagcatcagaatgacccccggaaaagatgtgccggcggattggtttccgcccatagacggtctggaggttctttgtctcgcttcaggaggaggacagcaagggccggtccttgctgctgcaggagcggacgtcaccatctttgacaattcggaaaaacagcttgcgcaagacagaatggttgcccagcgggacggtcttacgcttcggactgtcaaaggcagcatgaatgatctgagctgttttgatgatgagacatttgattttatcgtgcacccggtatcgaattgctttgttgatacggttcttccggtatggaaagaagcttatcgcgtattgaaaaaaggcgggtctttagtctccggttttgtaaatcccgtcgtgttcttatttgatatggatttagagcaggaaggcgtactaaaagtaaagtattccattccgttttcggatgaaaaagatctgagtaagaaaaaggtaaaggaacttattgataatcatgaagcgcttgaattcggccatacgctggaggatcaaattaaaggtcagattgacgcaggctttatggttgccggtttttacgaggacaaaggcggcctcgtgctggatgaatacattaatacatactccgtaacaagaagcattaaaatataaaaacggcatcccgtcagaggtgctgtttttttgcggctttttcctgcggacggctgatcacattagccgaaaccggttctattccaatctctctggcccaaaccgacagttgtcccatgtggtgaatctcatgcgcaaggatgtggcggagaatatcttctttaggaaaggtttggtccatccagtccggcttaacaagatccgcccctttgcgggagaccgcatgaatgacatcctcccgatactgttcagacagctttctgagatcctgaatgctcgtatagtcagactcagcgggtaaaacatcatctttacctaaaatggcacgagcccagctgatctcgacatcaatgatatgaaataaagtccgcaagatgctctccattccgcccgtccgggttttcgtcagttcctcccggctcagcttttcacatatcataaaccactcgtcacgcaccgtccaattgtattgaaacagctttttcatcacgtcacctcagctctttattcttccagttaacatgaaactccttcatttgggaggatttccactatcaacaaagcatgctttttcccttttcctttcaaaataacagtaaaaaggagcgtggctggcaatggcagaagtattatctttttcagacgtgaaacggcagaaggattatgagcttgagaagagtttactaaaggagctgtcactgacgcagatcattcagtccgtaaaagcatgtctcacccctttgtttccctttcttcaagacgaaaacggcattctgagtgaaggatgcatagattttgcaattgaagcgtatttattaggcggccggttcggcgtctttggattttatggtgagtctttgcagagggcgaacgcccgttcggctgaagaagaggaagaactgacggccgatttttttgaatatctttgcaattggacgcatgagcaatattcttccgttgaacaaaaagaaatctatgaagcgtcctgccggtttatcaacagctggtggacggaaggatttctgcaaagagaaaaacaatgtaagctccgcatgaggtaatcataatttcttcccttgtcccatacttattaataacggggacaagcgggagggaaagctatgacaaaaaagctgaaatggctcggttttttacttggctttatcatattattgtgtttattccggtttcaattccataatgatgattcatggcggccgtggagcctgccgctgagcgggaaaatcatctatctcgatccgggacacggcgggccggacggaggcgccacgggaggcagtcaccttgaaaaggacattactctcgaagtggcctccagggtcagagactatttgcaggagcagggagctttggtcattatgacgcgggagacggatactgatttagctcctgaagggacgaaaggctacagcagacgcaaagcggaagatctgagaaagcgcgtggagatcatcaaccgttcagaggcggagctttatatcagcattcatctgaacgccataccgtcaccgagatggagcggcgcccaaagcttctactatggaaaatacgaagagaatgaaaaagtggcaaaatatatacaggacgaattgagaatcaatttggagaatacaacgagaaaggcgaaacggatacacggcatttacttaatgcagaatgtaaccaaaccgggcgccctggtggaaatcggatttctgtccaatcccgcggaagcgaaaaggcttggccagcctaaatatcaggacaaaatcgcttcttccgtgtataagggcgtgttgagatattttacagaaaaaggagaccctcccgagtaaggagggtttttcgccgattctacgtttaatatatggtataataccatttgtaaacgaatacacaaagggtgagggttcgatgataagagaagatgaagtaagaaatatagtcggaaacatgcgcgaaccttttcttcatagaccgctgggagaattggatgccattaaagaagtaaaggtcaagccggaaaaacggcatgtcagtgtaaaaattgcattggcaaaaacggggacggctgaacagatgggcattcagcaggaaatcgtatccgttctgaaagaagcgggtgcggaaactgtgggacttcggtttgaagagctgccggaagaaacattggcgaaattcagccggcctgctgctgaaagcgaaaccctgctgaataggaaacatccgccggtctttcttgcggtggcaagcggaaaaggcggtgtcggcaaatcaacggtttccgtcaacctggccatttctcttgcgcggctcggaaaaaaagtcggcttgatcgacgcggatatatacggattcagcgtgccggacatgatgggtattacagttcgcccgacagttgaaggagaaaaactgcttcctgtcgaaagatttggagtaaaggttatgtcgatgggctttttcgtcgaagaaaacgctccggttgtgtggagagggccgatgctgggcaagatgctgaataacttcttccatgaggttgactggggagaggttgactatatcgttctcgacctgccgcccggcacgggtgatgtggcgctcgatgtacacacgatgcttccgagctgcaaagagattatcgtatcaacgccgcaccctacagccgcatttgtagcggcgagagcgggatctatggcgattaagaccgatcatgaagttgtaggggtcattgaaaatatggcttattatgaaagtgcaaaaaccggcgagagagaatatgtgttcggtcaaggcgggggagataagcttgcagaggaattgcaggtgccgctgcttggcagaattcctttaaaacagcctgattgggacaaggaccagtttgcgccttctgtctatgacagaagtcatccgatcggggaaatttatatgggtatcgcccaaaaagtcattgaaaaaacagctgaataaaaaaggggccgggatcaacacggcccggccttttattggctttctttttcagaacttgaagccgcttttttcaattcatcctcgaattgctttttgaaaagcgggctggaaagtgtctctgtaattacatcttctaagtaactgcggaacttttggcttttcaccagctcatagtattttttatccatgccggggtcctgcatgatctgcataaaacttttctgataatcagggtctttcatcaatttttttatgattttttcgtgctcgggctgaagcgtttttgcaaagctctcggcgaactttgagtcttcaaagatggttttccagaactccgccccttttttagaggtgagggttttctctattgtgcctttaatggcattttgatcaatcaccaatgcctcattcatcgcatcatcatttaatatttccttaattgctttttttccatcatctgtctttaatatatcaacaaccatttttttagtctggtcataatccatatccgctgcttggtcttttggagcacaagctgttacagataatacaacaaaacagcttatcaatagcgttttggcttttgacatgcataagctccttccttacttgtacttatttttaatatgattcatcggaatggatttatacataacaaaatatcgctgaacgcgattgtcaggggatgaataagagatgaaaagccgcgggcttgttcgatttttcttttcgattttagctgtgggcgctcttattacaagcgtcgtgggatttgcactgaagtggggggagtacaaggggttctttctgaattttgaggccggtcaaattttctccgttctgatctggtttatcggggtaggcatgattttcagtgtgatcagccagatgggattcttcgtctttctgacggtgcaccggtttgcccttgaaatcctcagatcaaactcgctttggaatctgcttcagctgtttatcattctgtttgtcgcttttgatttaatgtacgtcagatttttgtttttcggtgagcgggatgactcgattgcggggtttgtctggctgccgctggctctgcttgccgtcggcttgctgacggcgtatataaaacaaaagcagtcctcaaaaaatacgttcgtttcatcattatttttaatggtcgttattacagcgcttgaatgggttcctgcgctaagagtgaataatgaggactggctttatttgatgctgattccgctgatgggctgcaatgcgtttcagctgttaatgctgccgaagtttgcccagaggtagttatttcacttctgatgacttgacgtcagtatttgcgatcaggtcgccgactgtcacgtttttcagtcctttttgctttaaattgtgaatgatggcggggagcgcttcttcggtctgtgttgctgaatcagaggcgtgcagcaggacaatgtcgccgccttttatatgactgtttacattttcaatgattttatcaggaccgggatttgtccaatcctgcgagttaacgctgtaatgaaccactgaatagcggtactgctgtgcaatggcaagaacctttttattaaattgtccggtcggcgggcggagtaaatgaacattcttcacacccagctttttaaatgcggtctgggcccgaaggatatctttttttatttcgttgtcctctaggttggtataattcttatacgcatatcccatgctgccgatttgatgtccgtcttttaccatacgttcaactgtgtccgggtgccgttccgcccaagaagctgacagaaaaaaagtggcgtttttaataccgtttgcttttagcgcgttcagaatcggaaccgctttttcatcgccccagctgatatcgaatgttaatgcgacttcgcccgctttcgtctccccttttgaaatagccttcgggccgctatcagttaaaaatacaggaagggggacggctctctgtatataaaaaaagctggctgctgcaaatgcggcaatgataataataagcagctgttttatccttctgatgtgccacacgtagaagtggttcactggtgacgcctccttatcttgtccatgcttgattacatcgtatgccgcggcggagatgaatataacgaaatacgtttcaaaaaaaaacgaaaaaaatacttgctaaattcagccgatgcatggtatattattaaacgtcgctgatggacagcagacaacaacaaaaagcttcggaaacaacttaaaaaaagttgttgacataaaagaagctgagtggtaagataataaagctgcttcaacaagcggtaatgatctttgaaaactaaacaagacaaaacgtacctgttaattcaaagttttaaataaatcgcacagcgatgtgcgtagtcagtcaaactactttatcggagagtttgatcctggctcaggacgaacgctggcggcgtgcctaatacatgcaagtcgagcggacagatgggagcttgctccctgatgttagcggcggacgggtgagtaacacgtgggtaacctgcctgtaagactgggataactccgggaaaccggggctaataccggatggttgtctgaaccgcatggttcagacataaaaggtggcttcggctaccacttacagatggacccgcggcgcattagctagttggtgaggtaacggctcaccaaggcgacgatgcgtagccgacctgagagggtgatcggccacactgggactgagacacggcccagactcctacgggaggcagcagtagggaatcttccgcaatggacgaaagtctgacggagcaacgccgcgtgagtgatgaaggttttcggatcgtaaagctctgttgttagggaagaacaagtgccgttcaaatagggcggcaccttgacggtacctaaccagaaagccacggctaactacgtgccagcagccgcggtaatacgtaggtggcaagcgttgtccggaattattgggcgtaaagggctcgcaggcggtttcttaagtctgatgtgaaagcccccggctcaaccggggagggtcattggaaactggggaacttgagtgcagaagaggagagtggaattccacgtgtagcggtgaaatgcgtagagatgtggaggaacaccagtggcgaaggcgactctctggtctgtaactgacgctgaggagcgaaagcgtggggagcgaacaggattagataccctggtagtccacgccgtaaacgatgagtgctaagtgttagggggtttccgccccttagtgctgcagctaacgcattaagcactccgcctggggagtacggtcgcaagactgaaactcaaaggaattgacgggggcccgcacaagcggtggagcatgtggtttaattcgaagcaacgcgaagaaccttaccaggtcttgacatcctctgacaatcctagagataggacgtccccttcggggcagagtgacaggtggtgcatggttgtcgtcagctcgtgtcgtgagatgttgggttaagtcccgcaacgagcgcaacccttgatcttagttgccagcattcagttgggcactctaaggtgactgccggtgacaaaccggaggaaggtggggatgacgtcaaatcatcatgccccttatgacctgggctacacacgtgctacaatggacagaacaaagggcagcgaaaccgcgaggttaagccaatcccacaaatctgttctcagttcggatcgcagtctgcaactcgactgcgtgaagctggaatcgctagtaatcgcggatcagcatgccgcggtgaatacgttcccgggccttgtacacaccgcccgtcacaccacgagagtttgtaacacccgaagtcggtgaggtaaccttttaggagccagccgccgaaggtgggacagatgattggggtgaagtcgtaacaaggtagccgtatcggaaggtgcggctggatcacctcctttctaaggattttaacggaatataagacctcgggtcttataaacagaacgttccctgtcttgtttagttttgaaggatcattcgattcttcgagatgttgttctttgaaaactagataacagaagtaattcacattcaattagtaatgcaagatatcacgtagtgattctttttaacggttaagttagaaagggcgcacggtggatgccttggcactaggagccgatgaaggacgggacgaacaccgatatgcttcggggagctgtaagcaagctttgatccggagatttccgaatggggaaacccaccactcgtaatggagtggtatccatatctgaatacataggatatgagaaggcagacccggggaactgaaacatctaagtacccggaggaagagaaagcaaatgcgattccctgagtagcggcgagcgaaacgggaccagcccaaaccaagaggcttgcctcttggggttgtaggacactctgtacggagttacaaaggaacgaggtagatgaagaggtctggaaaggcccgccataggaggtaacagccctgtagtcaaaacttcgttctctcctgagtggatcctgagtacggcggaacacgtgaaattccgtcggaatccgggaggaccatctcccaaggctaaatactccctagtgaccgatagtgaaccagtaccgtgagggaaaggtgaaaagcaccccggaaggggagtgaaagagatcctgaaaccgtgtgcctacaagtagtcagagcccgttaacgggtgatggcgtgccttttgtagaatgaaccggcgagttacgatcccgtgcaaggttaagcagaagatgcggagccgcagcgaaagcgagtctgaatagggcgaattgagtacgtggtcgtagacccgaaaccaggtgatctacccatgtccagggtgaagttcaggtaacactgaatggaggcccgaacccacgcacgttgaaaagtgcggggatgaggtgtgggtaggggtgaaatgccaatcgaacctggagatagctggttctctccgaaatagctttagggctagcctcaaggtaagagtctcggaggtagagcactgattggactaggggcccctaccgggttaccgaattcagtcaaactccgaatgccgatgacttatccttgggagtcagactgcgagtgataagatccgtagtcgaaagggaaacagcccagaccgccagctaaggtcccaaagtatacgttaagtggaaaaggatgtggagttgcttagacaaccaggatgttggcttagaagcagccaccatttaaagagtgcgtaatagctcactggtcgagtgactctgcgccgaaaatgtaccggggctaaacgtatcaccgaagctgcggactgttcttcgaacagtggtaggagagcgttctaagggctgtgaagcaagaccggaaggacttgtggagcgcttagaagtgagaatgccggtatgagtagcgaaagaggggtgagaatcccctccaccgaatgcctaaggtttcctgaggaaggctcgtccgctcagggttagtcgggacctaagccgaggccgaaaggcgtaggcgatggataacaggttgatattcctgtaccacctcctcaccatttgagcaatggggggacgcaggaggatagggtaagcgcggtattggatatccgcgtccaagcagttaggctgggaaataggcaaatccgtttcccgtgaaggctgagctgtgatggcgagcgaattatagtagcgaagttcctgattccacactgccaagaaaagcctctagcgaggtgagaggtgcccgtaccgcaaaccgacacaggtaggcgaggagagaatcctaaggtgatcgagagaactctcgttaaggaactcggcaaaatgaccccgtaacttcgggagaaggggtgctctgttagggtgcaagcccgagagagccgcagtgaataggcccaggcgactgtttagcaaaaacacaggtctctgcgaagccgtaaggcgaagtataggggctgacgcctgcccggtgctggaaggttaagaggagcgcttagcgtaagcgaaggtgcgaattgaagccccagtaaacggcggccgtaactataacggtcctaaggtagcgaaattccttgtcgggtaagttccgacccgcacgaaaggcgcaacgatctgggcactgtctcaacgagagactcggtgaaattatagtacctgtgaagatgcaggttacccgcgacaggacggaaagacccgtggagctttactgcagcctgatattgaatgttggtacagcttgtacaggataggtaggagccttggaaaccggagcgccagcttcggtggaggcatcggtgggatactaccctggctgtattgaccttctaacccgccgcccttatcgggcggggagacagtgtcaggtgggcagtttgactggggcggtcgcctcctaaaaggtaacggaggcgcccaaaggttccctcagaatggttggaaatcattcgcagagtgtaaaggcacaagggagcttgactgcgagacctacaagtcgagcagggacgaaagtcgggcttagtgatccggtggttccgcatggaagggccatcgctcaacggataaaagctaccccggggataacaggcttatctcccccaagagtccacatcgacggggaggtttggcacctcgatgtcggctcatcgcatcctggggctgtagtcggtcccaagggttgggctgttcgcccattaaagcggtacgcgagctgggttcagaacgtcgtgagacagttcggtccctatccgtcgcgggcgcaggaaatttgagaggagctgtccttagtacgagaggaccgggatggacgcaccgctggtgtaccagttgttctgccaagggcatcgctgggtagctatgtgcggacgggataagtgctgaaagcatctaagcatgaagccccctcaagatgagatttcccattccgcaaggaagtaagatccctgaaagatgatcaggttgataggtctgaggtggaagtgtggcgacacatggagctgacagatactaatcgatcgaggacttaaccaatttgaatgtatgcttactgttatctagttttgagagaacactctcaatggtttggtggcgatagcgaagaggtcacacccgttcccatgccgaacacggaagttaagctcttcagcgccgatggtagtcgggggtttccccctgtgagagtaggacgccgccaagctttttattttatctaccatgtttttgtttatgaagcttataatattccgcagtagctcagtggtagagctatcggctgttaaccgatcggtcgtaggttcgagtcctacctgcggagccattgcttccatagctcagcaggtagagcacttccatggtaaggaagaggtcagcggttcgagcccgcttggaagcttatctaaaatacgttgatctgaagcagtttccgaatgttatggaactgttattttttgtttagttcagtaaaaacctgttgctgattgtaccagttaaggtgtaggtatttagcgcgtctcctgatgaagcctttcttcaaggatgcaaaagagattaacataattaattgttaaacgatattgacttttatcaaaaccttgatataattacttttgtcataatgaacagtataaataacaatacggtttaccgctatctgaagctgtattctggccatgtattacacttttacttgcggaagtagttcagtggtagaacatcaccttgccaaggtgggggtcgcgggttcgaatcccgtcttccgctccattttatcccaacgggatattgtgaaattgattgcgcccgtagctcaattggatagagcgtttgactacggatcaaaaggttaggggttcgactcctctcgggcgcgccataatattttttaaaatcgggaagtagctcagcttggtagagcacatggtttgggaccatggggtcgcaggttcgaatcctgtcttcccgaccattctcaagctttaaagataatatactggttttctttttttctctttttaaaaaaaatgcttgatttatagagaagcaccgtggtatattattaaacgtcgctgatggacagcagacaacaacaaaaagcttcggaaacaacttaaaaaaagttgttgacataaaagaagctgagtggtaagataataaagctgcttcaacaagcggtaatgatctttgaaaactaaacaagacaaaacgtacctgttaattcaaagttttaaataaatcgcacagcgatgtgcgtagtcagtcaaactactttatcggagagtttgatcctggctcaggacgaacgctggcggcgtgcctaatacatgcaagtcgagcggacagatgggagcttgctccctgatgttagcggcggacgggtgagtaacacgtgggtaacctgcctgtaagactgggataactccgggaaaccggggctaataccggatggttgtctgaaccgcatggttcagacataaaaggtggcttcggctaccacttacagatggacccgcggcgcattagctagttggtgaggtaacggctcaccaaggcgacgatgcgtagccgacctgagagggtgatcggccacactgggactgagacacggcccagactcctacgggaggcagcagtagggaatcttccgcaatggacgaaagtctgacggagcaacgccgcgtgagtgatgaaggttttcggatcgtaaagctctgttgttagggaagaacaagtgccgttcaaatagggcggcaccttgacggtacctaaccagaaagccacggctaactacgtgccagcagccgcggtaatacgtaggtggcaagcgttgtccggaattattgggcgtaaagggctcgcaggcggtttcttaagtctgatgtgaaagcccccggctcaaccggggagggtcattggaaactggggaacttgagtgcagaagaggagagtggaattccacgtgtagcggtgaaatgcgtagagatgtggaggaacaccagtggcgaaggcgactctctggtctgtaactgacgctgaggagcgaaagcgtggggagcgaacaggattagataccctggtagtccacgccgtaaacgatgagtgctaagtgttagggggtttccgccccttagtgctgcagctaacgcattaagcactccgcctggggagtacggtcgcaagactgaaactcaaaggaattgacgggggcccgcacaagcggtggagcatgtggtttaattcgaagcaacgcgaagaaccttaccaggtcttgacatcctctgacaatcctagagataggacgtccccttcgggggcagagtgacaggtggtgcatggttgtcgtcagctcgtgtcgtgagatgttgggttaagtcccgcaacgagcgcaacccttgatcttagttgccagcattcagttgggcactctaaggtgactgccggtgacaaaccggaggaaggtggggatgacgtcaaatcatcatgccccttatgacctgggctacacacgtgctacaatggacagaacaaagggcagcgaaaccgcgaggttaagccaatcccacaaatctgttctcagttcggatcgcagtctgcaactcgactgcgtgaagctggaatcgctagtaatcgcggatcagcatgccgcggtgaatacgttcccgggccttgtacacaccgcccgtcacaccacgagagtttgtaacacccgaagtcggtgaggtaaccttttaggagccagccgccgaaggtgggacagatgattggggtgaagtcgtaacaaggtagccgtatcggaaggtgcggctggatcacctcctttctaaggattttaacggaatataagacctcgggtcttataaacagaacgttccctgtcttgtttagttttgaaggatcattcgattcttcgagatgttgttctttgaaaactagataacagaagtaattcacattcaattagtaatgcaagatatcacgtagtgattctttttaacggttaagttagaaagggcgcacggtggatgccttggcactaggagccgatgaaggacgggacgaacaccgatatgcttcggggagctgtaagcaagctttgatccggagatttccgaatggggaaacccaccactcgtaatggagtggtatccatatctgaatacataggatatgagaaggcagacccggggaactgaaacatctaagtacccggaggaagagaaagcaaatgcgattccctgagtagcggcgagcgaaacgggaccagcccaaaccaagaggcttgcctcttggggttgtaggacactctgtacggagttacaaaggaacgaggtagatgaagaggtctggaaaggcccgccataggaggtaacagccctgtagtcaaaacttcgttctctcctgagtggatcctgagtacggcggaacacgtgaaattccgtcggaatccgggaggaccatctcccaaggctaaatactccctagtgaccgatagtgaaccagtaccgtgagggaaaggtgaaaagcaccccggaaggggagtgaaagagatcctgaaaccgtgtgcctacaagtagtcagagcccgttaacgggtgatggcgtgccttttgtagaatgaaccggcgagttacgatcccgtgcaaggttaagcagaagatgcggagccgcagcgaaagcgagtctgaatagggcgaattgagtacgtggtcgtagacccgaaaccaggtgatctacccatgtccagggtgaagttcaggtaacactgaatggaggcccgaacccacgcacgttgaaaagtgcggggatgaggtgtgggtaggggtgaaatgccaatcgaacctggagatagctggttctctccgaaatagctttagggctagcctcaaggtaagagtctcggaggtagagcactgattggactaggggcccctaccgggttaccgaattcagtcaaactccgaatgccgatgacttatccttgggagtcagactgcgagtgataagatccgtagtcgaaagggaaacagcccagaccgccagctaaggtcccaaagtatacgttaagtggaaaaggatgtggagttgcttagacaaccaggatgttggcttagaagcagccaccatttaaagagtgcgtaatagctcactggtcgagtgactctgcgccgaaaatgtaccggggctaaacgtatcaccgaagctgcggactgttcttcgaacagtggtaggagagcgttctaagggctgtgaagcaagaccggaaggacttgtggagcgcttagaagtgagaatgccggtatgagtagcgaaagaggggtgagaatcccctccaccgaatgcctaaggtttcctgaggaaggctcgtccgctcagggttagtcgggacctaagccgaggccgaaaggcgtaggcgatggataacaggttgatattcctgtaccacctcctcaccatttgagcaatggggggacgcaggaggatagggtaagcgcggtattggatatccgcgtccaagcagttaggctgggaaataggcaaatccgtttcccgtgaaggctgagctgtgatggcgagcgaattatagtagcgaagttcctgattccacactgccaagaaaagcctctagcgaggtgagaggtgcccgtaccgcaaaccgacacaggtaggcgaggagagaatcctaaggtgatcgagagaactctcgttaaggaactcggcaaaatgaccccgtaacttcgggagaaggggtgctctgttagggtgcaagcccgagagagccgcagtgaataggcccaggcgactgtttagcaaaaacacaggtctctgcgaagccgtaaggcgaagtataggggctgacgcctgcccggtgctggaaggttaagaggagcgcttagcgtaagcgaaggtgcgaattgaagccccagtaaacggcggccgtaactataacggtcctaaggtagcgaaattccttgtcgggtaagttccgacccgcacgaaaggcgcaacgatctgggcactgtctcaacgagagactcggtgaaattatagtacctgtgaagatgcaggttacccgcgacaggacggaaagaccccgtggagctttactgcagcctgatattgaatgttggtacagcttgtacaggataggtaggagccttggaaaccggagcgccagcttcggtggaggcatcggtgggatactaccctggctgtattgaccttctaacccgccgcccttatcgggcggggagacagtgtcaggtgggcagtttgactggggcggtcgcctcctaaaaggtaacggaggcgcccaaaggttccctcagaatggttggaaatcattcgcagagtgtaaaggcacaagggagcttgactgcgagacctacaagtcgagcagggacgaaagtcgggcttagtgatccggtggttccgcatggaagggccatcgctcaacggataaaagctaccccggggataacaggcttatctcccccaagagtccacatcgacggggaggtttggcacctcgatgtcggctcatcgcatcctggggctgtagtcggtcccaagggttgggctgttcgcccattaaagcggtacgcgagctgggttcagaacgtcgtgagacagttcggtccctatccgtcgcgggcgcaggaaatttgagaggagctgtccttagtacgagaggaccgggatggacgcaccgctggtgtaccagttgttctgccaagggcatcgctgggtagctatgtgcggacgggataagtgctgaaagcatctaagcatgaagccccctcaagatgagatttcccattccgcaaggaagtaagatccctgaaagatgatcaggttgataggtctgaggtggaagtgtggcgacacatggagctgacagatactaatcgatcgaggacttaaccaatttgaatgtatgcttactgttatctagttttgagagaacactctcaatggtttggtggcgatagcgaagaggtcacacccgttcccatgccgaacacggaagttaagctcttcagcgccgatggtagtcgggggtttccccctgtgagagtaggacgccgccaagctgtcttaaaccagttcatgatgaactggtttttttatttgaaagatcacatagatatataaagctaatgcctttcaaaggcattagcttttttgtttacattgattttgctttgctgttgtgattttgaagattgtttgattttattgtctcgagtattcttaaactgaacacaatcagcagcataaggaccatcagtgcagtaaacagccagaacgcagtttgtgcgggatattcatctaagctccagccgacggcgatcggaaggagtgaacctcctaatccgtttgaagcgagcagaatactggtagtcgtttctgtctttccgggataaaaatgattcgtgatgattagggctattgcaaacatgcctgccatgaacagccctaaaaagaagcaaagggcaaagccgaaccatacgtttttacttagtgctaatacggtaagtgctgccagaccgccaatgcttatgagacgaagataacggtgatatgtcagcttttctgataccgggcctgttagtaaccttccgatgatcatccccgtccaatacactgtaactgttatcgttgccaaagagttggggatatcccatttctcagagaaaatggaggggataaaatgtacaattgaaacttcactgcctccgtaaaagaagaagtaagcccccgccaaggcaataaacagcaatccgtgtgaccgataaccggtgctttcttttttagtgtcatcggaagagacctcttttcggatgagaagctgatcaatactgccgaaactcatctgcttccatgcgattaaaagtgcaaaactggataaccctaatactaaaaaagcaattgtccacatgtggttgttgataagaaagcctgagagcagaggcatgaaaagcgcgcctaatccgtaggccacttccatcttgctcatggccacagcctgtctttctttaatagcggtgaggatgatcgtgcctacacaggattccaccaatccggcgccaagccccgcgatgctgacgagaagaaagagcagcggccagggcggcaggaaggtgatgaacatttcgcagctgatgagtgccaggccaaagataacgacgtttttgcgcccaagctttttcaccatgtatggcatgccaataacaccgatgagaaagcccatgaactgagagaataccaatacaccgccattactgtagctttgtgaataatgtgtgagtaactcaggcagtacggctcccagaataacaagtgtaaaagcaatcgatccataagaaaaacagcttatccacagcagacgagatttcatcattttatctccttattcgtaaaataatatttctctctactcgtatgacatgacgtttttacaaaaaatccaagtattgttactatatcacataactttttctcgtacatcccttatggtaacgttaacaaattgttaacattttttacaagaaagatcgttgacaatattttcaataattaatacgataaaaagcgaaattctaataatttcataggggtggtatttgtgggaacgaaggaaatcacgaatccagacagcttgtattacagtgttgacgatgtagtaatggagcgcggagaagggatttacctgtacgatcaagaggggaatgagtacattgattgcgcttctgccacatttaacttgaatttaggatacggtaacaaagaagtcattgatacggttaaagaacaagccgataagctgatccatgtgacatcatcttttcaaacagacgccgtaaataaactggcagaaaaactagtagaaatcgcccccgataatctcacaaaagtacaccctaaagtcagcagcggttccggtgcaaatgaaggagctattaaaatggctcagtattactccggaaaaaccgatgtcatctccttatttcgaagccacctcggacaaacgtatatgacttccgctttgtccggcaactcattcagaaaagaacctttcccgccgcaaatttcttttggccttcaagtccccgatccgtattgcagccgctgtttttataatcagaaacctgattcatgcggtatgctgtgcgtagaaagaattaatgattttattgagtatgcgagcaatggaaaaattgccgccatgattattgaaccgatatccggaaacggtggaaacgtcgttccgcctaaagagtattttaaacagctgagacagctttgtgatgaacacgatatcgccctgatttttgatgaaattcagaccgggttcggacggacgggcaaaatgtttgccgcggaccacttcgatgtgaaacctaatatgatgacggtagcaaaagggctcgggggcacaggcttccaagtcgccgccactctgacggaggacaagtataccgggcttccggggtatacgcactccttcacgtacggctcaaatgtgatggccgccgctgccgcgtgtaaaaccatagatatcatgcagcgtccgggatttttggaaaatgtaacgacggtcggtcattatattatggatcgcttagaaacgatgaaagaggatttcgcttttatttctgaggtaagaggcgtcggtcttatgatcggtgtggagattgtaaaagagaacaatgaaccggatgtggagctgaccaattatattgcaaaacgggcaatggattacgggctgattctccggacatcccgttacgggttcggaaatgtttttaaaatccgaccgcctttaactattacacttagtgaagcagaagtgctctgctacagacttcgcaagctattggaggaaatcaagtgagagactatatcatcgggcttggacaatttgtttatcataaggtgaaaagtcaaaaaggcacgctgaaaaaccggctcgtaaacggctattctccgggaggcgacgcccaatttaacatagacgccgctgctgaggaggcggtgctggattatattcaagataagggccatccggttgctttttacacggaggatggcggcctgaagctgattggagaagatccgcaatatattttaattgtagatccgatagacggaacgcgtccggccgccgcggggcttgaaatgtcgtgtatttcgattgcgcttgcttcgtataagccaaacgcaaagattaaggatatcgaatttgcttttttgcttgaattgaaatcgggcgcttacatgtacggtgatatttacagcgacgccattcagtttgaggggtatcagggagaattgccgaatttgagcgaagtgcgggatattaaaaatatgttttggagccttgagtttaacgggcatccggcacagctgatgacggatgcatacggtcatctgattgaccggtcagccaataatggcggggtttttgttttcaacagcgcttcttattcgatttcacgaattatcacggggcagatggatgcttatgtggatatcggcaatcgtctgctgaaagatgatccgaagctgctttcagattttcagcaggtcggaaacggagaggtgctgcatttgtttccttatgatattgccgcaagcgtctttttggcgaagaaagcaggagtggtcattacggatgcatacggccggtctttggacgaaacgcttctgacagatttaagttatcagaaccagcaatcatgtattgcggcatcaacgaaggagcttcatcaaacattgttagaccaaatccgctggggcagaaaggaagagaaatatgaaggcgttggtctggactcctaatgataagcttgaatatcaagaggtggacgagcctcaaattcggaaatccaatgatgtgaaagtgaaaattttcggcaccggtatctgcggaacggatttaaatgtgctgaaaggaaaaatgaatgcaacccatcatatgattatggggcatgaatcggtgggagcggtcgtggaaatcggaccggacgtgacaaatgtaaaagtcggagaccgcgtcgtgatagatcctacgcagttttgcgggaaatgtcattattgccggagagggctgacgtgttattgcgaaaccttcgaggattggcagctcggaatcggggcgcacggaacgtttgcggaatattacgtcggagaagacaggttcatgtacagaattcccgattcaatggaatgggagcgggccacattggttgagcctctctcctgtgtgctgaatgttgtggacaaagcttcgattcagccggaggactcggtcttggttttggggtcggggccaatcggactgcttgtgcaaatgatggtgaaaaaactggcgcgattgacggttgcgactgaaataggcagtttccgaagcgaggcggcgagccggatatcggattatgtctaccaccctgaagcattaaccgtggatgaagtgaaacggattaatcaaggaagaaaatttgatgtaatttttgacgcgatcggcaatcagcttgattgggcttatccttttattgaaaagggaggcagaatcgtgccgatgggctttgatgatacgtatgagatgacagtcaggccgtatcagctgctgtcaaacggcgtaacgattgtgggcacaggtgaagcccgtcagatcatggaggctgcgttagcatgtgcatccgaccttccgcagctctatgattttattacggaaaagacggaactgaagaattatgaagaagccattgatcatctcatgggcatcgacccggtgacaaaagaaagaaaggatatcagcgcaataaaaacgattcttgtgtctgatccggaacttttataaaagcggaaacggctccagtgagagccgttttcttttcttttttatacggtcttgcacatttctttaaagtttaatatgatactctttgttaaccattcctttcctcaagacattatactctgagcgtgtccccttttccccgtaagcttgcctcatattccccagataaaaatcaatgtttccaactgataaggtgcggatttttatagtgaaaaggagtcgttatcatttgaaagattatacgttacagcagcaatggttcgggaatgtccgtaaagacattctggccggtattctggttgctctcgctctgatccctgaggcgatcggattttcaattattgcaggtgttgatccgatggtcgggctttatgcatcattttgtatcgcgattattatttctatcttcggcggcagaccgggaatgatttcagccgctacgggttcaatggcggttgtcatggtgacattggtggctgattacgggctgcagtatttgtttgcggcaaccattttgacaggtattattcaatttattcttggtgtcagtaagatagcgaaattgatgaaatttattccgcgttcggtcatgatcggatttgtgaatgctttggcgatcttgattttttctgcgcagctgccgcagttcaaaggagcttcatgggtcatgtacgccatgcttgtcggatcactggctatcatatatcttttgccgaaggttacgacggctgtgccgtctccgctggtggcgattattgtcatgacgatcattgcggtggtcttccatgcggatgtccgcacggtcggtgatatgggcgggattacaagttcacttccgcatttcttgataccggatgttccgtggacgtttgagacattgcggattattttcccgtattcactggcgcttgcattcgtcggattgcttgagtcattgctgacggcccagatcattgacgaaatgacggatacggatagtgataagaacaaagaaagccgcggacaaggcatcgccaatattgtgaacgggtttttcggaggcatggccggatgcgccatgatcggccagtctgtcattaatacgaaagccggcggtcgcggccggttgtcggcttttacggccggagcgtttttaatgtttttaattgccgtattaagcggtatcgtcgtgaaaattccgatggctgcgcttgtggccgtgatggttatggtgtccatcggcacgttcgactggtcatcgattaaaggtttgcggaaagcgccccttactgattcgatcgttatggtgattaccgtcgtgacggtcgttctgacaaatgatttatcgaagggtgttttcgcgggtgtgctgctaagcgcgatcttttttacggcgaaaatttctaagctgaagattgtgtcacattccgaacagaaagatgtcagaacttataaggtaacgggacagatcttttttgcttccgtgtctgaactgatgaatgccatcgtttatgatgaagacgtgaaacggattatcatcgatttgactgatgcccacgtgtgggatgattctggagcggctgctcttgagaagattgtcgccaaatgtaaagaatacggaattgaggctgaattaaagggattaaatcagaaaagccgagatttaatgaaacaaatggcatagaatttgtgaagtccggatgaatatatccgggctttttttcggttaaatttgccggtgtgcattgttataatgaatgagacttgaaaaccgtatataggagacttgcatatgatgtggcttcagaagttgaaccaagtgttggggagaatcatgccgcttttgactccgtctagtgtggcggcgggtgtgctgttatctcagcatatcagctggatggccggcgctgtgccgtggatatttgcatttattacatttacgggcagtctgagtgccaattttcaatcgctgaagcgcagtatcgagaagccgctcccgatgatcatggcattgtttgttctgcatattttcatgcctgtttttgcatggggaagcggccatctgattttcagcggtgaccctttaactgtgacggggctgattatgggtgtggtgattccgaccggaattacgagtttgatttgggctgcgatgtataagggaaatgtcggattgacgctgtctattatcctggttgataccgtactttctccttttatcgtaccattaagcctgtctgtcctggccggggcgaatgttcagatggatgtgtggggcatgatgaaagggctggcggagatggtggtgattccgtccatcgcagggatgatggtcaaccagttttccccgccggtaaggactcaggcgataagccggtcactgtctcctttttcaaaaatctgtctgatgattgtcattgccattaacagttcggaaatcgcgccgtatgtcacgcacgtggatatcaaatttgcgggcatcgcaggcacggtattttttattgccatgacgggttatgccgtggcttggctgatcggaagactgatgaagcggagccaggatgaaatcgtgtctctgatttatacggggggcatgcgcaatatcagcgccggagccgttctcgccgtgtctttctttccgtctcaagtggcggttccggtcgtcatcgggatgctctttcagcaaatccttgccgctttgttcggctatttgctgagacgctttgagcttaagccggtcgtgatcaagtatgaaaaaaaccgctcagtcacgtgagcggttttttccgtacagccagcttagtgctgaattaaattgtcgtttgaacgcttcttgatggtgcacggcgccctcttcgatcgtgaatgagagctgagattgagaaaagcctttttgcctcaggcttttgtacacgtctttattttgtccgatcatggtgttttggatgttacatttttgctctgcttcacggctgccgacagacataaagatacgctgccgtgccggccgcaaaggtgcggagcggacataatctgctgatttttcataccagaaggaaccggaaatacagccgattctgccgaatatttcaggcttttgcagcatcgcgtatatcgaaaacagtccgcctaatgacgcaccgatcagtcctctcgtttccggatgcgcagaaatgtgatgcgtatcttcaacagtgggaataatgacatttgtcagctcctcgagaaagagcctccctttgccgccgaaatcatgaaacgcagggctcagggaaggcgcgggccacggtgtgtactcatcgagtctgtcagccggtttgatgccgatgaaaatcaattcgggaagtgttccgttcgtaaattgggattcaagcttatctatctgttctaaaaacaaagaacccccgtcaagtacgtacacacagggtaaagcccctgtttgaaccgaataggaaggaggaagatacacagtgcattcccttccgtttatcgggtgttctgtaagggtgcctctcatgcgtccatcccctttttttgcttaaacagaagaaaaaagaaataaggaacgccgagaattgcaaggataattcccgccggcacttctgaaggctgaaagaacaatttgcccgcaaagtcggcggatatgacgaggagcataccgaccagtccgctgaccggtaatgagtatctgtgctcaatcccggcgagcctgcgggaaatatggggcgcgatcagtccgacaaatgccatgctgcccgctgcggttacacatgcgctgatcaaagcgatgcaggcaatgagcaaaatggttttttctttattggttgaaacaccgaggcttttcaccgtgtcctcatcgaaacgaatggtatcaagcaatgacgttttcgccataagaagaggaatgaacaagatcagccacggaaggattgccgtaatggtcatccagtttgccgaccagatgctgccgtttttccaaaccatcgccatctcataatcctgcgggtccatttttaatgatagaaataaagacagcgcgctgaatccggaattcatggcgatcccgacgagaataattctgcccgattccagatgcccccggtgccaggcgaaaatatagatcagcacggccgccatcagtcctccgatgaggccgaagacaggcatacccatcgcagaggcaagtgccgtcgcttcagattgtccctgaaacagaagcataaacgtgacgattcccgctccggctcctgcattaatgcccaaaataccgggatcggcaagaccgtttttggtaatggcctgaataacagctccggctatccccaatccgagtccgatggcagcagccatgactatgcgcggcagcctcagctgaaacagcaaaatgtcatattgcggattcggatggatgcggaaaagcgtactgagcagttcacccggctttgcggaaaaagaaccgcttgtcatgctgaaatagcttacgagcaatatgagagcaatcagaatgatataaattcctgccattttacgcaccacgctgatcccctccttttcttttaatcaaataaagaaagaaaggaacaccgatgatagaagtgacaacttcaataggcgtttcaaacggataattgatgaatcggctcgcaaggtcgcaaagggtcagaaagacgccgccgataatgcacgcgcatgggatcagcctgctgtagtccgatccgacgagaaaacgtgtgatgtgcggaacgactaaaccgacaaaggcaatttttccggcgagcgccaccgagcttccggtcaatatgacaacagccgccatcgccatgagtttgatggttcttttctgctgtcccagactttttgaaatgtcgtctcctaatgatacggcagtgacctttttgctgagaatcatggccgtaatgattccgatcgcaaaaaacgggacggccagtttcaaaaaatcagggttcatttgatgcagtctcgcactgtaccaaaaactgagatcctgcgaaatttgaaaataaatcgaaagcgcagccgacagactgctgagaagcatactggtcaccgttccgataatggcaagctgcaccggggtaaaaccgccgggaagaatggaggccagcccgaaaacaagagcggcgccgaatgcggaaccgataaacgagtagatgatcatttcaatggatgtcgattgagggagcaataccatgcaaagggtgatgataaaagcggagccgtccgacacacccatgatcgaaggcgaggccagatagttccgtgtgattccctgcatgagcgctccggaaacagcaagggcggcgccgataaacatagcaccggcagccctcgggattcttgaatgccatatgatctgatggtcggtattctccggattaaagtgcagcaatgcggagaacacggtatggatgtcaagctgctttgcgccgtataaaacggaaaggagcagtgacagaacaatagcaatcggtgaagcaatgataataatgtgtgtccgccgttttgcatacatgtgaaaaacctactctttattagtcttgagtcaatttgtcagccgcaacctgtaagaagctgattttactccacgcggttccgccttgggctaatggatcaatcgtattgacgtatacatggtcttttttgactgccttcaggctcttccagatcggatttttctctaagtctttcaaagcgtcaggcttatctgcgttttcgtcatcagaaaattgtacgaagatatggtcagggttcatttcgcttaatttttcaagagaaatcagttcctgcgctttcgccgctttgacttcgtccggcgccttcaggcctaaatcaccgtaaagcgtggagttgaaataaacttgttcaggataaatataaatattgccttgtctgattctgatgaccagcgcgtttgactgtttcgctttgctgttgatctttgtttttgtctttttcaggtcctgttcgtaatctgcgatgatttttttcgcttttttctctttatctgtaagctgggcgagcagcatcatgttttctttccagtttgatgagatatgagagacagggatcgtttcagcggtgccgctcaattttttcaacgttttttccgggaatttggttgatgccagaatgacgtccggctgcagctcaagaattttttccatattcggctgcattttttcccccgttgatacggatttatctgtaatatctttaaacagttccgggaatttgccggagaaagaaattgctcctgccggatgaacgtcaagcaatttggcgtcttccattgattctacgctgcctgtaatggcgattttgtcagtcggcgctttgacttcatatgtttttccgagatattcgattttctttttatctgaagaagcgtcctttcctttacttgctgtatcagttgtttctgagcttccgcaagccgcggccgtgaaagccaaaagcaaaatcatgaaagcgaatgccaatttcttcatctattgttcctcctgttcaattgataactattatcaattggaattatagagaatgaatagggataagaccatggataatttccggcattaccatggacgatcttcggataaaatggaaatgctttgctcgatcatccgctgatgtccgcttggagaatattcaatccacgggtcagatgaaatgggaaacacgcgtttattgctgacggcactaaggttctgccatatcccggactgctgaatccgctgaaaatagcgaagcgtttccggttctttacaagtgaaaagcatgatgcagtcagcctggcaatccgccagcatttccaaggaaatcttttcgtcaggagcaaatgattccggttttgcggaggcaaagtccaaatcaccgaagaagacttcctcaatactgttgttatgggcgatgtacatattttctttatatacacggacaaataagaaccgctggtgccgcacatgtttaagagcatctttcgctgaatgggtgagactttgataagttttaagccagtgccgcgcttcctgctcttcattcagatatgcggctgtgcgaagaaactggtctctccaattctcttgagccggaagataaaaaacttcagtgatgtcattcaggcgctgtttttcttcttcactgacagaatcgagactgaaaataatgtccggggcagcttgagacagcgtatgcaggttctcttcccaatttgcattatagcggtaagcgctcaggtggaccggaatatcggaagagaattgtttgtaataataggccgtccatttcgggtgcagcgccgcagcgtaaggcacgtgatgcagaggaatcagatgccccatcgtttcttttccgtacgcggccatttttgtgcgcctttttttcatgtagcttgtaggtgagctgccggtatgttttttaaagatgcggctgaaataaaattcgtcctggtagccgatttgatgagcgatttcccgcagtttgcagcttgccttggccatcagttttttcgcattggttatgcggatgtctgtgatatattcagttacgctctgcccgtatagttttttaaaggtttcactgtaatgcttgggactgattcccgccatatgagcgagctgggtgagcgtgatttttgtgtcggactgagcatgtatgaattgttttgtctgttcgatcgccgctttcgtattattttgatggcatacttttgcggcataaaggtcgtacatcagctgctgaaagtcggcggtatatttcattttctgcaatccatccgccgatcgcacgttttcagaaagtgattgaagccggcttgtcaaatgatcaaccgtttgtaaattcatttgctgaagtccgtggaagatgtcttccccgttatccggaagcatcgcttcatcatctgaggaataggagaaaacacggagtctgacgatatacaaatggatgccgcctgacgatataggggcaatattgaatgtctcatcacaaggacagatgtagagcgtttccttctgcagcggaaagctgtctgttccgatatcaatttgtccctcgcctttcacatgaaagatcaatacgggggaatcagtgagctgatgctctgacagaaggtcggctgtttttttcacggagatgatatcaatgggctgaaagaataatgtgtttttcatgagaaaccaccttttaggaaacattcatttaaatgataacagttatcatttaaattgtaccaaataaatgaatgttttcctataaaaagcggaaatgtgaaatgcgtcaaaatgttacacgtgtaacacgaatgttgtcagtatatgaggtattgttttcttagagttttgaattggtccagccggcgttgatatgtgccggtgatgtcttcaatggaagcgcctttttctatttttttgcgtacccagccgttaccgatcagcttgtcaaaagagcctgtcggcaagaatgaaaagtcattcggatataagtcatgcatggttttcagaatggagagccctgtttttgccgcttcaaatgtgtttctgtttgttacgtagacttgtacgccgtggcacagcttgccctggtgtttggagaagctggggatgaatgaagcggctctgaaggtgacgcccgaaagcttgagactgttcaggcgttcttcgagctcggtgcttttcatataaggcgcgccgataagttcaaacggctttgtcgtgccccttccttcggatacgtttgtgccttcgattagtcctgttgccgaatatgcaaatatgctgtccggggtcgggatattaggcgaagggaggacgaacggcagaccggtatcttcaatcgtcatcgtccgcttccagcgcttcatttttacgacggtgaggtcagcgccaatatgaaactctttattgaataaaagagcaagctcaccgatcgtcatgccgtgcttcagcgggatcggatacagtccgacaaatgaagcgtaatccggttcaagaaccgggccgtccggatttcgtccgccttgcggattcggccggtccaagacataaaaaggaatgcctttttctttggccgcttccatggcataggccattgtataaatgtaggtgtagtaccgggttccgacatcctgaatatcgaaaatcagcacatctgtatctttcagcatgtcaggcgtcggtttcctcgtctccccgtataggctgtagacgggaagccctgttttttcgtctatataggatgtgactttgtctccggcctgagcatcgccgcggacaccgtgctccggtccgaataatgccgtcaggcggatgtctggcgcctcatacagcacgtcaacgctgcttttcaatgatgcgttcacaccggtcgggttggtgatcagcccgaccctttttcccttcagttcctgtttataatctttcagcaggcggtcgatgcctgtttggatgcttggtttcttggcggtatgaaggtttctgtcagaagccgccgagactgccgtcatagcactgatgacgacaagtccggcgagaagtgcagccgtatgtgttttcataatcagccctcctgtttaaagcggttttccggtcttcagattgataccgaaaccataaggatacagtgtcgttcccggatgcgtgactgaaggaatgtcagcgggcagcctgccttgcggtgttgtctgtccgaatatcgcttcaatgcctgccggaatgtttggctggaggaattgtccgtctgtatatcctttaaagccgtagactgcgataagggcttcagcttcttcaaaattcgcggcgtcgtaaggattacgcaggctcatcagcacaaagggtttttggttcgattgtgcggctttcatgacggcccgcggaaatgcggtcgtccacttgccgggatctgtgacggaatcgtcaatcacgccgtcgtttacgacagggtcattttttacgacataggagcctgtaatcacgtaatccgcgtcggataccagctttttgtgttcatcatgaaatgtgcgctcggcgaagttcattttactgatggttaccggccggatttttttcttcttgatgagctgccgaatggtttgttccattgccgctgtttgatcttcataaggagcggcaatgagaacgcggctgttctttttcggtttgaatgggagcgtgcggtttttgttttgtaagacggtgacggatctttccgcgatttgtttttcagctttcaggtgatttttgctgccgacggttttctttgcttttgcaatcttctttttcagatttgtctctttcggtgcgggatatatccctcgttttattttcagggaaatgatgcgttccgctgatttgttaatttgctgcagcggaatatcccctttttgtaccgccttttttaacgcggaatgaacccgggcaaagcggttttccgtttgcagcgatgtcacttgggccggcatcagggcaatatcgactcctgcttttactgccatgacgaccgcctcttcctgaccgaaatgatcggcaatggctttcatatttaatgcatccgtaacgatgacgccgttaaatcccatttcctcacggagaagatgagtcatcacttttttcgagagtgtggcgggtacgaggatgtctgaaccgtccagcttgcttttataggttgtatcgtcaaaagcgggaaattgcacatgagctgtcatgatcatatcagctccggcctgaatggcctgccgaaacggataaagttcaatctgacgcagcctttcttgattgtgggtgacaagcggaagaccgtagtggctgtcgacatccgtgtcgccgtgtcccgggaaatgtttgacggcggcagcgacattctgcttttgctgagccttcattgaggcaaggccgagggaagctgtcagatcacggtctgaactgaacgacctgacgccgatgacagggtttccgggattattattgatatcgagaacgggcgcgaaattcgtattaatgcccagtgctttcagttctttcccgataatggcgccggtctgggacgcgtaggctgtttttctagcagccccgagcgccatattgcctgggaaatgagtgccctcaccaagtctagttacgatgccgccctcctgatcaatgcttaataatagcggaatgtcagggctcgccttttgaaaggcatctgtcaggcgtaccgtttgctcagtgttttttacattttctgcaaataagataacgccgccgaaccggtacttttgaataagccctgcgacttcgtcattcatttgggtaagagcctcaggtgatgactgcccctttttttgccaatttcgaaaatcaggcatgagcatctgccctaatttttcatctaacgtcatacgggataccgcttgttccgcctgtgacggaatgtccggttttgttgatgcatgatgcgtgccgaatacaatgaacaacagtaatacagctgagatgaaaagtttcatgatggtgccctcctgccgtcatagtttggacaaaagacatgggttgtcattcaatggcttcataaatcgcttttatgacgctgccgtagcttccggtcgggaaaagatccccttcaaaaacattcgggttttcaccggggctgacgacgggggaatgctttttattggtcaaaagtgcgatccccagcttataagcgggatcaataatcgtgatggtgccggtccatcccgtatggccgtatgcctgcctgcttgcataaggtccgaacatccactccatatccgggctgccgtttttccgccagccgagagcgaaagtcggatcagaggatgccgccgttgtgaacaaatcggccgttcttttattgaagagagaaacgtgtttataactgcctctgttcagcatgacttgaagaaggacggccatatcatcagctctggaaaacagcccggcgtgaccggacacccctcccattgagtaaaatgctttttcatcgtgaacttccccctgcagcgtatatgtcctgatgtgagggaaatggatgactccgtcacgtgtgttgcctaaacgttcagtagctgcgaatgctttttctttaaaacctttttgcagcggattgaacagtgtgtgcgtcagtttcagcggtttgtacagttcttgttccgcataggtatcaagggtttttccggttatgttttcaatgatgcatccgagaatcatgtaaccgatatcgctgtatacgtgttttgttcccggcttgtattcaagcgggatctgggtgagaaaacggattgttttatcccgttcttgtgaatataaagggcctgcggtgtccggctgatagaaataaaagcttgccggcagaccggattgatgctggagcacatcgatgacgcgtatacggtctttttcttgaatcggatcgctttttctgtctttgaaatcaggaaggtaagccgagactttttgatacacatcaagctttccctggctgacgagtcgctgtagtgcaaaattggccgcgtacatttttgtattggaagctaaatcaaacatggttgatgttttcatttttttcggacgggataaaagggtgttcccgtcatattttttgctgtagccgtatgctttctttttgatcacccgtccgtcctttacgacgatgaggacggctccggggaatcctgctgcgatgtctttttcaatcatttgatcaacctttctgagctttgctgcgtcgtataatttggattgggcttcggctttgtgctgcggcagaaaagagaggctgatgaccattgtgagtatggcggctgtcagtgttttcatattctgatccctcccggtttattcaaattcagcagccatgtcatccttaaatccgaacgcataagtgaagacaaagcctgccgcgtaagagatgaagagaccgatgatatacaaaacgatttgagccggctgtacgagaaacgagagcggaaggccggagacaccgattgaaaaagtcgccacttgaaaatgggcttgaaaggcgccgccgattcccgcccctaaacacgccgtcaaaaacggccggccgagcgggagcgtgacgccgaagataagcggctctccgattccgagcagaccggatggaagtccgccgccgatcgctctttttaatgaggctttttttgttttcataaagatggcgaaggccgcgcctacttgacccgcgcctcccatcgcgagaatcggaagaagcgggtcatctccgattgatcggattaattccaaatgtacgggagtcaagccctgatgcaggccggtgacgacaagaggcaggaaggcggctcccagtacaaaccctgagagcactcccccgacattcagcagcgacaataaacctgatgtaatcagatcagaaataaaaccgcctgcagggataaaaacgacatatgtcaccagcccggtgataagtaaagacaatgtaggcgtgacgataatgtcgatggattgatggacgtactttctgataaaccgttcggtataagcgataaaaaccgcagcgaaaagaacgccgattaatcctcccctgccagggagcagattctctccgaacaaactgatattggcgatctcagggttaaggatcaatatgcccgcaaggccgcccatcgcgggtgtcccgccgaattccttcgccgcattgatgccgacaaggacgccgaggtaagcgaacaagcctgaaccgataaccgttaaaataagtgcgatttgggattctttcgggagccagccggcctgaatgacggctttcgtaataccggtgattaaacctgatgcaatgagtgcaggaataaggggaatgaagatgcttgatatttttctcagaaacaatttgatgggtgtggtgttttttctgttgagatcggcttttttccgtgaggcggcttcttttaaatcaatgttttttccggatggcataagttttgcgaaagcgtcggcgacatgattgacgacacccgtgccgagaatgatctgcagtgtttcggcttcgacgacgcctattaccccgtcaagccgtttcagcgcctcaatatccgttttgtcccgatctaaaggtgtaatcctcaggcgtgtcatacagtgggtaaagcctgaaatattcgatgaaccgccgcaattgtccaggatatctttggccagtgactgataaaatgcctctttgctcatggagatcctcctttttctgtacgatttttcccggggagctatgcctgaaacgcgtcctaaaagcgcctgcgccgaacatgaaaacggcgcgggctcgtaaaagcacaatatttttctccaaagaacgatcagcgttctttttctcttgaaacgtgctgttcaatggctttatcaatgaatccttctgattctttgagcagtgccttcgcgtgtgtttcgtccgaattcgtcttcagcatgacgattgccgttttgacatggctgtctgcggcctcaagcgtttcttttgccttgtcgtacggaacgcccgtgatgctttggataatgccgattgcgcgttctttcaatttttcgttgctgacatgaacgtccaccattaaattttcgtacactttgccgcttttaatcatcacggccgtggaaatcatgttcagaatcattttatgtgccgtcgcggctttcattcgtgttgaccctgtaatcacttcggggccgacaatgacttcgatgctgtgatcggcaaaggtgctgatcaaggagtccttattgcatgtgagcgcgacggttttggcgccgattgtttttgcatatttcagcgcaccggccgcatacggcgtgcgcccgcttgccgcgatggcgatcacggtgtcttctgcggtaagcccgatcgttttgagatcgagagcgccggtttcctcgctgtcttctataccttcagccgcttgcaaaaaggcgtctgcccctccggccatcagaccgatgacggtgtcgggacttacgctgtatgtaggcgggcattcaaccgcatccagtacaccgagtctgccgcttgtgcccgctcccgcataaatcagcctgccgtttcgccgtaaggactgatgggcgaattgaacggcaatctgaatatcgggcagcacctgctgaacggcttcagccactttgaaatcctcttcgttaatgatgcggagaatttccattgtgtctgcctgatggattgaagcggtctgcggatttctggtttctgtggtcaatctgtgaatgttaagccggtctgtcatgattgtaccctcccaagtcgttaatacttgaagtatatgggcttctgaatagatgtttcaagaaaaatcggcagggatgagatgaataatcaagcgctttcacaaaaaatgatgcagaatgtgctgttcaccgatcgggccgatcctgcgccgccctttgtcaataaaaccggaagaccggtacaggttctttgcacgttgattgcgatggtttacagcaagcacgatttcatcacaccaaggaaagtaatttgcgacaaaagcggggagctgcagcatcgcttgtttggcataaccttttccctgatgcggcgcatgtaatgacagcgcactcagcaaaatggcagacacattgttcgaatacggagcaatggtttcttttgaggtatgtaaaataaaaaaaccgacggggcggtcttcttttaaaatgactgtcgggtagcgatcccggatgacaagcgcctgcggcaggacatctatcggcagagctgtgaactttttatcttcttcactcagcacaaacccgttcagcccgtctgcatgctccggtttataaaaggacagggctacatccatgatatctactctccttttttataattgatccaattcatcttctgatagaacacggcagcctgcccgttttaaaagagcggaagtgatgccgtctccgagtattttttttcctgagaaagtgccgtcatagataaagctgctgccgcaggacggactgttttctttaaggatgaccgttgcggcgcctatttcttttgcgtatgctaacgttttttccgcgccgtccatatataaagctgtaacgtcttcgcctgatgccgttacgattcttgccgttccgttcagcacgtcttcacccgtgccgccgatgatttccgccggttcgcggggagtggtgaagccgcccaaaagttcggggcagaccataacagctttcttttcttctacgagtctgcggattttttccgaagcggcgtgagagccgttatatctgcattcgataccgccgagacaagagctgactaagatcatctgtgtccattcccttcaatattttgatactttcatcataaatgaaataagagaggagggatgagtttttcagttaaaaaacgggtaaaaaagtttgaaaataaaaaaaataatttttctctttacaaatggggtacaacctgtatataataacttttgtcagctcgacgcggacacagcggcccgttggtcaagcggttaagacaccgccctttcacggcggtaacacgggttcgaatcccgtacgggtcatatggaggattagctcagctgggagagcatctgccttacaagcagagggtcggcggttcgagcccgtcatcctccaccatatttgccggcctagctcaattggtagagcaactgacttgtaatcagtaggttgggggttcaagtcctctggccggcactgttttccaaaaaaatacggaggggtagcgaagtggctaaacgcggcggactgtaaatccgctccctcagggttcggcagttcgaatctgcccccctccaccatttttgggctatagccaagcggtaaggcaacggactttgactccgtcatgcgttggttcgaatccagctagcccagtctcagacaccttttgcataaaggtgtctttttttatcggcattttgtttcggtttttgattgttcatcagatatactatttttaagctgctgttaaggcagtatattctgtattttccatctacaccctgcctgaaatttggtaaaataaatgtaataaaaaaatgaaaccttttaaaacaatcaacgtatagatacagaccggtgaagggcagaggtaagataaaacatggaaaacctgattaaaaaaagaatcaagcaagtcaaaaaaggcgatcaaaatgcgtttgcagaaatcgttgacctttataaagataagatttaccagctttgctaccgcatgctcggcaatgttcacgaagcggaagatattgcgcaggaagcttttatcagagcgtatgtcaatatcgacagtttcgatatcaacagaaagttttcaacgtggctttacagaattgcgaccaacctgaccattgaccgcatccgcaagaaaaagcctgattactatctggacgcagaagtagcgggagcagaagggctgacgatgtattcgcagatcgccgcggacggggttctccctgaagacgccgtattgtcattggagctgtcggacacaattcagaaaaagattttaaagctgcctgacaagtacagaacggttattgtattaaagtatattgacgaactctctttaattgaaatcggggagattctgaatatccctgtcggcaccgtcaagacaaggatacacagaggcagagaggctcttagaaaacaattgagggatctttaagtggggtgatgaaatgagctgtcctgaacagattgtgcagcttatgcataagcatcttgatggagatatccttcctgaagatgaaaacgtattaaaacaacatttgcagtcatgcgggaattgcaaacggcattttcatgaaatggagaaatccgtagcactcgtccgaagcacatcgcatgtcacggcccctgctgattttactgccaaagttatggcgaatcttccaaaagagaaaaaacgcgcttctgtaaaacgatggatcaaaactcatccgatgattgcagccgcagcggtttttgtgattttaatgggcggcggttttttcaacagctggcataatgaccacaatttcagtgtgtccaaacagccgaaccttgtcgtgcagaatcacacggtcaccgtccctgaaggcgagaccgtaaagggcgatgtcacagtaaaaaacggcaagctgttcattgaaggaaaagtcgacggcaatgtgaccgtcgtcaacggagaaaaatacatggcctcagccggacaagtcaccgggcagattgaagagattaaccaattgtttgactgggtctggtacgaactgaaatcggcgggacagggcgtcgtaagcgctttggacccgaatgaagatgagtaaagcgtataatcgctttactctttttttgtgcaacgccgcgccggctcatttcacttgagaaatcaaaatgtggtataatgagcacgctatatgatgtacatattgctcatgcagcacaattcataacggaaaaaacgaaatgactgaattcttggaggacgaggaaatggcttttgaggacatcccatttttgcaatacctcggcaatgccgttgatattctccttgtttggtatgtgatatataaattaatcatggtcatacgcgggacgaaggcggttcagcttttaaaaggaatcgtcgtcatcgtattggtccggatggccagttcatatttgggactcagcacgcttcagtggctgatggaccaagcgataacatggggatttttagcgatcatcattatattccagcctgagctgagacgggcgcttgaacagctcggacggggccggttcttttccaggagcggaacccctgtggaggaagcgcagcataagacaattgaagcgattacaaaatcgatcagctacatggcgaaacgccgcatcggcgcactcatcgccattgagcgcgatacgggaatgggcgattatattgagacgggcatcccgcttaatgcgcaggtcagctcggagcttttgattaatatcttcatcccgaatacaccgctgcatgatggagcggtcattatgaaaaataacgagattgctgcggctgcctgttatctgccgctttctgaaagcccgtttatttcaaaggagctggggacgcgtcacagagcggctgtcggcatcagtgaagtgacggacagcttaaccattattgtatctgaagagacgggcgccatcagtgtggccagaaacggagaccttcacagagaattgacggaagaagcactgaaagaaatgcttgaagccgagtttaagaagaacgccagagacacttcttctaaccgctggtactggaggggcaagaaaaatggataaattcttaaacaaccgctgggctgtaaagatcattgcattgctcttggcgctgctgctttacgttgcggttaacaacaaccaggcgccgactccgaaaaagccgggggaatccttttttccgacatcaacgactgacgaggctacgcttactgatattcctgtaaaagcatactacgatgaagcgaactatgtcgtcaccggcgtgccccagacggtaaatgtcacgattaaaggctcgacaagcgcggtgaaaaaggcgagacagacgaagaattttgagatatacgccgatatgaataagctgaagaccgggactcataaggtcgaattgaaggcgaaaaacgtatcggacggactgacgatctccataaacccgtcagtcacgacggttacgattcaggaaaaaacggctgagagttttcccgtggaagttgaatactacaataaaagcaaaatgaaaaagggatatacccctcagcagccgattatcagcccgaaaaacgtgcagattacaggttcgaaaaatgtgattgataacatttcacttgtcaaagcatctgtgaaccttgaaaatgcaaatgagaccattgaaaaggaagtgaaggtgaccgtctatgacaaagacggcaacgcacttcctgttgatgttgaaccgtcagtcattaaagtgacggttcccgtagccagtccgagcaaaaagcttcctttcaaaatcgaaaggaagggaagtcttccggacggggtgagcgttgcgagcattgactcgaatccgagtgaggtgacggtttacggcccgcaggatgtgctggattcacttgaatttattgacggcgtatctcttgatttaggcaaaattgataaagataccgatatcaatgccgatatcccgcttcctaagggtgtcactaaggtatcaccggaaaaaatcacgcttcatgttaaagtggacagtgaagacaaaaaggattttgacaatgtcgcaatcaagacggtcggactgggaggctcacagcagattgagtttctcgaccctgaatcgcaggcgataaatattacggccaaaggctctcccgccaacattaaggcgctgaaaaagtcggacattgaactgtatgccaatgtctcggacttggatgacggagagcactctgtaaagcttgaagtaaacggcccgcaaaacgtcacatggtccctgtcaaaagacacggttaagatcaagctgacttctaagaaaaacacaagttcaaataaaaatgacggcggctccgctgattccggcaataagaacggcacaagcggagacgcagacaaagacaagaacaagaaccgggaagacgacactgacagcgatcagaataaaagtcaaaaccaggatcaaaatcaagaccaggatgaagacggatcaagcgctgattcttcttcaacagaatgaaaaaggagcgatacaaaatgggcaagtattttggaacagatggtgtaagaggtgttgccaacagcgagcttacgccagagctggcctttaaagtggggcgttttggcggttatgtcctgaccaaagataagcagcgcccgaaagtgctgatcggccgtgatacacgtatctccggacatatgctggagggagcccttgtcgccggacttttatcgatcggagctgaagtgatgcgcctcggcgttatttctacgccgggggtatcctatttaacgaaagccatggatgctgaggcgggcgtcatgatctccgcttctcacaaccccgtacaggataacggaattaaatttttcggaggggacggctttaagctttctgatgagcaggaggccgagattgaacgtctcatggaggaaccggaagataagctgccgagaccgacaggcgcggacctcgggcttgtgaacgattattttgaaggcgttcaaaagtatctgcaatttttaaaacagacggcggacgaagattttacaggcattcatgtagcgcttgactgcgcccatggtgcgacatcttccattgcgacgcacctttttgccgatctcgatgctgacgtatctacaatggggacgtctccgaacggattaaacattaatgatggcgtcggttctacacacccggaagcgctgagtgctttcgtcaaagaaaaaaacgccgatatcggccttgcgtttgacggagacggcgaccgcctcattgccgttgatgaaaaaggaaacatcgtcgacggcgatcagatcatgtacatatgcgcgaagtatttgaaatcagaaggccgtctgaaggatgataccgtcgtatcgaccgtgatgagcaacctcggtttctacaaagcgcttgaaaaagaagaaatcaaaagcgttcaaacggcagtcggcgatcgctatgtcgtagaagcgatgaaaaaagacggctataatgtcggcggcgagcagtcagggcaccttattttccttgattacaacactaccggcgacggtcttttgtccgcgatcatgcttgtgaatacgctgaaggcgtccggcaaaaccctttcagaacttgcggatgaaatgaaaaaattcccgcagctcttagtgaacgtgaaagtgacggataaatataaggtagaagaaaacgctaaggtgaaggccgtgatttctgaagtggaaaaagaaatgaacggagacggccggattttagtgcgcccgtcaggcaccgaaccgctcgtacgcgtgatggcggaagcgagaacaaaagagctttgtgacgaatatgtcacaaaaatcgtggatgtcgtgcggacagaaatgggagcggagtagcgaagtttataagcagagagcgaacaagacaagtgcgatcagcataaaatgatagtaaacatgatgccggggcggcaaaaaataattgaccgtccttggcacatgctgtaaaatcaagcttgttcagcctttgtttttcacttgcaggaaaggcgggattgtttgcatcttttataattacagcgcccgaactaagcgcccgaaaaacggcttagttgacgaggatggaggttatcgaattttcggcggatgcctcccggctgattcatttagatcacagccgtaaggatttcttcaaaccggaggggcgactctccgaacaaagggaaatcacatgatcttccaaaaaaacatgtgggaggggacgattgaaagtccccttgtaatttgactttcttcgtctccttttacacctttaggaggaagaaaatatgtgtggaattgtaggttacatcggtcagcttgatgcgaaagagattttgttaaaaggattagagaagcttgagtaccgcggctatgactctgccggtatcgctgtggcgaatgagcagggcgtgcatgtgtacaaagaaaaaggccgcatcgccgaccttcgtgaagtggtggaccacacggttgaatctcaagcgggaatcggccatacacgctgggcgactcacggcgaaccaagcttcctgaacgctcacccgcatcaaagcgcactcggccgctttacacttgttcataacggtgtgatcgagaactatgttcagctgaagcgcgagtatcttgaaaacgttgaactgaaaagcgacacggacactgaagtagtcgttcaaatgatcgagcaatttgtggcgggaggactcagcacagaagaagcgttccgcaaaacactgactctgttaaaaggctcttacgcaattgcattatttgacggtgaaaacacagacaccatttacgttgcaaaaaacaaaagccctctgttaatcggccttggagatacgtttaacgtcgtggcatctgacgcgatggctatgcttcaagtaacgaatgaatacgttgagcttttggacaaagaaatggtgatcgtgacaaaagacgaagccgtgattaaaaatcttgacggtgaagtcatgacacgtgcgtcttatatcgctgagcttgacgccagtgatatcgaaaaaggcacataccctcactacatgttaaaagaaacggatgagcagccgcttgttatgcgcaaaatcatccaaacgtatcaggacgaaaacggcagactggccgtggcgggcgatgtcgctgacgccgtggcggaagcggaccgcatttatatcgtggcttgcggaacgagctatcacgccggtcttgtcgggaaacaatatattgaaatgtgggcaaacgtaccggttgaagtgcatgtagcgagtgaattctcttacaacatgccgcttctgtctaagaagccgctctttatcttcctttctcaaagcggagaaacagcggacagccgcgccgtgcttgttcaagtcaaagcgctgggtcacaaagcgctgacgattacaaacgttccgggatcaacgctttcccgtgaagcggattacacattgcttctgcacgcaggtcctgagatcgcggttgcatcaacaaaagcgtatacggctcagattgccgtcctcgcgatcgttgcgtccgttgcagcagaacgcaacggcgttgatatcggttttgatttggtcaaagaattaggtattgcggcaaacgccatggaagccctctgcgaccagaaggacgaaatggaaatgatcgcgcgtgagtacctgactgtttcaagaaacgctttcttcatcggccgcggccttgactacttcgtgtgtgtcgaaggcgccctgaagctgaaagagatttcttacatccaggcggaaggcttcgccggcggcgagctgaagcatggaacaatcgctctgattgaagaaggaacaccggtctttgcgcttgcgacacaagaacacgtcaacctgagcatccgcggaaacgtgaaggaagtcgcggcccgcggcgccaacacttgcatcatctcgctgaaaggcttagaagacgcagacgacagattcatcctgccggaagtcaaccctgcgcttgctccgctggtttctgttgtgccattgcagctgatcgcttactatgcggcactgcaccgcggctgtgacgttgataaaccgcgcaaccttgcgaagagcgtgactgtggaataatatatttaacccctttggttattagccagaggggttttttaatgcggaaatgagaaatgcatactctttgcgattgtaaagaaatccccttttatatattgaaaaggagtaacacctgctttataatacgagatgcattccggttaaaatccataaatgtaatcattagtaaatcattttgtgtatacctcatcggaaagtaaacacctcagcagttttcatcatgaatatcccattatataaacctaatcaatcgattacacttccatattatgcttaagactttaaaatcccttttgtatttcccgactcctgatccattatgaatacctagaccagatatgaaaatcacaacatttttacaataatccggttcaattcttaaaaaagtcctgacaacaatgataggagtggaatgatgtcaaaccttttagaaatcagaaacatcagcaaatcttttggtcataaagctgttttaaaggatgttacattcaatgtgcctgccggatcaattgtcggttttatcggtgataacggcgcaggcaagtcaacaacatttaaaacgatattaggattaatctctcaggatagaggtaaagtgaaaatctttggtaaagagaatctggataaacatataaagtttaaagaagatattggggtcgtatttgatgcgatgaatcttcccgcgcaccttacgataaagcagctgaatcatgtatttaagaaactgttcgacgcttgggaccaagatcaattttaccggttggttcattctttctctttacctatggataaaaaagtgaatacattctcgcgcggcatgtcaatgaagttatctgtagctgttgctttgtcgcataatgcaaaattattacttctggatgaagcaacgggagggcttgatccctcttcaagagatgatctgttaaatgaattaaaaagctttgtgagtaaaagcaacggaggtattttactttcatcgcacattatgactgatgtcgagaagatagccagccatatcattatgatgaaagatggcgaaattttattaaatgaagagaaagataaggttcttgaaagctataccgttatagacgttgatgaaggtcaattggctgagattgacgaagatatcgttctagcaaaaaggaatcatggatcttattggagtgtgcttgtatcggatcaacagaaattgccgaatggcgtaacggccaacaccatttccatagaagaaatcagcgtctttttaacgaggagtgaaaacattgagaggtctgttactgactaactattacttggtttatcggagtttctttgcatacacggggttggccatattggtatcagcagtcattttttattttggggatgcttcaatgcatcgttttgttgctatgctgattattttgtttgtcgttatgcccgcacttgaggttataaagtatgagagcaagtcaggctatgacaggtatgttctgactttaccggtcagcagaacaaatattgttcaaagtcactatttcttttatcttttgattgttgtgatcggagctgtaatatcttatggtattttccttgtatacagcctgggttctgatgaaccaattgacggtatatttaatattgtctcttttggaacgttcatcgttctctttgccggtgcaatcgtttatcctcttctctacatgataggcccggaaaaatccgatgctatcgtgattggaggggcaatggggggactttttgctacctttggattgcaaagtgtcgttgggtatgcagcagaacaagtaccgctgtcatttttgcacataaatccttctttatatgtcccgattatatatctcatgatcggcgttatcttatatatcatttcatttttcatcgccgcagctatatatcataaaaaagaattttagcagctgatcaatttataataggataagtgtgtttccagcctttactgcaaagtttcacagtcttggctatcccagagtaaaaggtgaaaaagctgacaaatgatgccgtcagcttttctttatgtgtttttttaaaactcctcatactccgccgggtcttggccgtttatccgtccgtcggggcgggtaagcgagtcgatgatgctcatgtcgttttcatcaagggagaaatcaaaaacagagatgttttcaagctggcgctcgggcgatgctgattttggaatcgggatggcgcccagctggatatgccagcgcaaaatgacttgagaaatggttttgccgtatttgtccgcaatctgtccgagtttttgatcgttcaatacttcgccggcgcgggataacggactccatgattctgtcacgatgccctgttcttcgtgccattggcgctgctgctgctgattaaaagcgggatgcagttcaatttggttgatgcctggctttacaccggtttcacgttcgagccgttcgatgtgctcaggcaggaaattgcagacgccgatggatcggatcaggccccattttttcgcatcaatcagtgcctgccatgcttccgtgtagcggtcttgtttcggattcggccaatggacgagatacaggtcatagtagtccagaccggcgcggtataaagattcttggatggtttgtacagctttgtcatagtcatggtagcgcccgggcagcttggacgtcacgtatagctgttctctcggaacagagcttctgcggatggcttctccgaccgtcccttcattttcatagttataagcggtgtcaatcagacggtagccgatatcaatggcgctggtaatggcatgaacgccattgtttccattaagagcgtatgtaccgaagccgatcgcgggaatgcttgtcccatcaagcagtttcttttgcggaattgccccagtcatcattaaatccctccttgttttctactttaccattattcttacaaatgaaacataataatggaaggaaatgagatgatccgcacatgaaaaaagctgacggagaaccgccggctttaaatttgaaacatccatgctacgacggggccgaagaccgaccctaacacggcgcagagcgtcatggaaacagaactcatggagaccgttaattctccgtactccattgcttttgaggtgccgagcgcatgggaggcgctcccgaatgcaattcctttcccgagtgagctgcggatgcggatccacttgagaagcagcggtcctaagataacgccggaaaaccctgcgatcatgacgaacacgactgtcatggaagggacaccgccgataccggacgcaatctgtatggcgacaggcgtcgtaattgattttgggataattgacaaaatcaaactccggctgatgccgaacagctctgcaaatagcaggccgctgaccattccggagaataaaccggccaacacgccgccgatgatcggaaacatatacttgattaacacccggcgctgcttataaagcgggtatgccaaagccaccacagcggggccgagcagtgaattgatccattgtccgccgatcatatagtctttatacggaatatgaaaaacaagcagcacggcgataatgaaaatcgtagtcgtcaaaaccggtatgagaaaggggtatggaaagcgcacatataatttcaccatagccagataggcggcggccgtgaacaaaattataaggattgcgatacatgcttgctgcacttctttttctcctttctctgattggctttatgctctaacagctggctggcgtaccctgcggcgatcattgtgacgatggtgctcagcacgatgatcagaaacagagcagccccgctggcggaaaacagtgacgggtaattgatgacgcccgtcatggccggaatgaataacagcggaagaaaagacagcaaaaatccggctccgtcttcaatcattttgacgggaatgatcttaaccgataaacatatgatcagcaggatcaaaccgatgatgcttccgggaatgggcaggtgaaagaactgctgaacggctcccccgataaaggaaaatgcgaataaaataatgatttgcaagatgatgcgtatgactttcacaacgatgctgttctttggagaagagcagcttccccctttcttgatgtttctataagtttctttacttttggcacatatatttgtactatacaaatatatgtatgcaaaatctttctatatgttttctgagtaaatgtgcatatgtttgtattatacaactaatgttgctgttgtcaatgtaaggagtgaggcgtttgtcaaaacaagatccgattgaattaattgaatatgaactcaccactttcatcaggagagctgtttatcttgataactccgaccgtaaaatcggacatctggaaagggctgcgtatttgttattacggcagctggatgaattcgggccggcgcgtgtgaaggaattggccgaatcatttaagctggatatttccacattatcacgccaggcagcggccttggagtcgaaagagctgatccagcgtttttccgatccttctgacgggcgggtcagtctgtttgcgattacgaagcttggcaaacagaggttaaaagctgataaaaagatgcgtcttgagcggtatcatcgtatgcttgacgattggtccggcgatgaaaaagaaatgttcggccggcttttgctgcggctgaatgaggcatttatcgattaatgcatgatttttgccgggttaagcaggattatggcgtatacaagggagaatggaagagagtaaggctttacgccattctgcttagcaaaaataatattggatagggggcggaaaacgtttctcctgggaaataatgtttctcggaggctgcggcatttattatctcaatattcacaattcaataaaaatgaaagcgctttatttttagtccgttggttcagagtgtaaggtgtttgcctgaaaaaaacaattgtattttccacgaaaatttattatgatggaataaggaaattggagattatataacgataggaagatagaatatttccaatattgcgggaaatgaagagtgagttaggttcaacaggtgcaccttctgcttcattatttcacatatatcagagctgttaagaggaggaagcgaagtggcaaacaaagaattaaagagaggcttaggcgctcgtcatatacagatgattgcgctgggcggcacgatcggtgtcggtttattcatggggtcatccagcacgatcggatggaccgggccgtctgtcctgctggcttatgcgatctcgggtatctttatcttttttatcatgcgtgcgatgggcgaaatgctctatgtagagccgagtacagggtcgtttgcgacattcggccataagtatatacatccgttagccggctatatgacggcgtggagcaactggtttcaatgggtgatcgtcgggatgtctgaaattatcgccgtcggttcgtatatgaaatattggtttcctgatctgccggcatggattcccggcattatcgccatggccattctcggtgcggcgaatttaatttcagtaaaatctttcggtgagtttgaattttggtttgccatgatcaaaatcgtcaccattattctgatgattgtggccggaatcggaattattttcttcggtttcggtaacggagggcatgcgatcggattatctaatttatggtcgcacggcggtttctttacaaatggtttttcaggatttttctttgctttgtctttggttgttgcggcctatcaaggggtcgagctgatcggaattacggcaggggaagcgaaggacccgcaaaaaacgctgcgaagcgcgattcagagtattatctggcggattttaattttctacatcggtgcgattttcgtaatcgttaccgtatatccgtggaatgagcttcactcactcggcagtccgtttgtttcgacatttgcgaaagtcgggattacggcggcggccggtctgattaactttgtggtgattaccgctgcgatgtccggatgcaacagcgggatattcagtgcgggacgtatgctttatacgttaggcgtgaacggacaggcaccgaaattctttaagaaagtttcttcgagcggtgtgccgatattcggtacgcttgcggtattaatcggacttgtgatcggtgtcgtgctgaactacatcgcgcctccgaaaatctttgtttatgtgtacagcgcgagtgtgctgccgggaatgattccgtggttcgtcattttgatcagccatctcggtttcagaagagcgaaaggcgctgagcttgataagcatccgtttaaaatgccttttgcgccgtttacaaactatttgacgatcgctttcttactcatggtattgatcggcatgtggtttaacaaagatacgcggatttctttggttgtcggggtgattttcctggcgattgtgacggtcagctattatgcgttcggtatcggcaagcgcatgcctggtgaaaaatcgaaaatagaagacgctgtataattcaaaaagacacctctcttacaggggtgtctttttcggcttgtccgcgagtggtatactggttaaaaaaagcagaaccgggggaaacatcgatgagtcattaccgtacgttattatttgatatagacaatacgctgctggattttaccgcttcagaaaccgatgctcttcaaaaattgttccaaggttcaaagctggagctgacggcagaggtggaagcccgttataaagcgttaaatcaagggctgtggaaggcgtttgaagagggggaaatgacccgcgatgaagtggtgaatacacggtttgcccttttgtttaaagaatacggccttgaagccgacggcgtgctgatgaatcaggcgtaccgccaatacttagaagaagggcaccagatgatagacggagcttatgagctgattgaacggctgagtcctttatttgatttatacatcgtgacgaacggcgtctcaagatcacaatataagcggctgggcgactccggtctgtatccgttttttaaagatgtgtttgtatctgaggacacgggttttcaaaagccgatgaaggaatactttgattatgtatttgcgagaattcccggtttttctgccgggcacgggcttattatcggcgattcattgagcgcggacataaaaggcggtcagatggcgggaatggatacgtgctggtttaatcccggaaagaaagcaaatgagtccgggattatcccgacgtatgaaattcattcgcttgatgagctgtatgatgtgctgaacgtggaggttgtcgctttatgatttctcaatatatgtataatataatttatatcaagttgtctcgggaaggattattatgaaaaatctttcttcaattagtacaagagtgctcatagagaaaaccattatttgtttttccttatattctattatcagttctatttttaaaacgccaacttttacggcttcggaatccgcttacctgctgattatcaccatttttttagtcgtcaacgatcatatcagattaaaatacctaagcggtcagtattcttttagatattatgcatcttttttagtaagtaaccttttatcaggcattttattgtttaaaattaactgtctcggttctcaaatatataatatttttttactgatcgagattattgtaacaactcgtaaactgccctggactgtagtaagtctgcattttattattttttttacagctcttaaagcagcagggaccagcgggaaagatatattgatgtcctatttagtgatcatggctattatttatctgtttagaaacgtactgctcgaaaaagcaaaaatacaaacattaaataaagaattacaaagtgtaaacactaaacttaagaattattctcaaaaaattcaagagttaactatttctaaagagcggacaagaattgcacaagagcttcatgattccctggggcattatttgatcgcattaacaatgaatcttgaattcgccgataaaatagtaagtaaaaatcccggcgaggctaaacaagtcatcaataagtcacatgatttatcgaaggagtgtattattaacctgagagaagctgtcgctttgctcaatgaccctgctcctcaaaaagggcttctgaaatcgatcaatgagatttttgaaaattttcagcaaacaaatgaaataaaattcgagcttgatatggacaataaagtagagtcagctgatccagatatcaagaattgtctctataaaacagtacaagagtctataaccaacgggataaaacatggaaatgctacgtttttttcaataaaaatacgtaagtcttttgaaaaaatctctatatcgataactgataacggaacaggatgttctgaaattaataagtcaaatggaataaacggaatagaaaaaagatttgccgcacttggaggagaggttgatttttattcagggctagattcaggatttactgtggaagccgtaatccccgagatagcagatctttaatcggaatgtgaggaggtattgatatggatattatcattgtggatgatcagcaaattgtcagggaagggcttaaaatgattctgagtctgcacgaggaaattaatattgtaggcgaagcttctaatggtgaacatttattagatttgctaaaacagataaggcctgaaatcattttaatggatataagaatgcccgtaatggacggcattgaagcaacaaagctagttaaagagagatatccggatattaaagtgattatcctgacaacctttaacgatagtgaatacatttttactggactgaaaagcggtgctgatggttacatactgaaagattctgattcacaagaaattattgattccatcaaaacagcatgtgaaggcaatattctgttaaatcctaaggtaacgctaaaagttgtaaaggctctaaattcggtagaacataataaagagcttgttcaagaaaataatgaaaaggaacagctggtgcaattgcttactcccagagaaaaagaagtcgctaaacagattatggaagggaaaagcaacaaagctataagcgaagcactgtttattactgaaggcacagtcaaaaattatgtatcaagaatactggaaaaacttcaaatgaacaaccgaacggagcttagcttatatttacaaaagcatatgtgattcaacttttttccttcaatcagaaaggaatttcatcaaattcctttcctccattttcttctgaatatatccggacttacaccttccgtatatgactaaagtaacgatgcgattcgtaactaaagtaataaggtaaatgagtactatagtaaattctaaaaatattccattcaggttaaaataaaagaaccgaaataccacgaggggtgttttaattatgcttgaattaaaaaaacttaccaaaaaatatgatgactttacggcagttaataatatttcgctgactgtagaagatggagaagtattcggactattgggtcctaacggtgccggcaaatcaacaatggtttctatgattagcactgttcttgcacctaccagcgggacaattaaagtagataataaatcacttaaggaaaaacctattgagataaaaaaaataatgggggttgttccacaggatttagctttatatgaaacgttaagcgccaaagataacttgaacttcttcggaagcctttacgggctgaaagggaaaaagctaaaagaaagaactgatgaggttctggagattattgaactgacagataaaaaaaatcaaaatgtatcagagttttccgggggaatgaaacgccgggtcaacataggcgtggcgttaatgaataatcctaaattattaattcttgatgagcctactgtaggaattgatccgcaatcaagaaatcatattcttgaaacagtaaaaaggctgaataaagaaaaaggaatgactgttatttataccagccactatatggaagaagtagagtatctttgcgagaaggtggcaattgttgatcatggatctcttattgctttaggaacgaaagaagaactcaaggaaaacttaaatgcttgtgacactttaactgttacttttaagggtgctgatgaagaggcactcagccggataaacagcattacaggaattgataaagtgacggtagatcataaacaaatttcaatgcttgtatcgacgaaggaaagaaacatcattgaaattgtagatgatatcaaaaatctggggatcgacctcactagctttaagtacgaggaagtaaatttggaaagcattttccttcaaattacagggaaaaacctaagagattagtaggaggaggctatcttgagaaaattattcaacttattttttcttgattttaagctgttaacaaaaaataagtcattttatttaaagctgatgctgtttccatcactgctaatcctcatattgggcagtgtgttcagtaattcagattcaaaaatcgaagcatttgatgtagctttttactcagcagattcaggagagagtgtttctttaggtgatgtcttaaaggataaagtttttaagaaaggagatctcaaagatatcattcatttaaaagaagctgagagctacaatgacggtgaaaaattagttaaagaaggaaaggctgcagcttttatctatgtaccggaacactttacgaaagccgttatgaacaacgggaaaacaaatatcgatttaattggagataataataagaccatagataaaaatattgttcaggctgttttggagggctttacgaaaagcgtgaaaacaatgagtgctgagcaacaagaagtaataaaacatatcagccccggcggcagcgtaccaaaagaaaaaatagaaaaaatgatgaacgatttggccgataatgacgggatctccgctgatatcccaaaagcagcgacaaataaaaatgcggttcctgtcgattccatgcagtattattcaattgcaatggttgttatgttttccattatgacggcttttgtgcttgttcatagcattgttgatgagcggcagaataatacgctgttcagaattaaatctacaccgactttaaatattcagtatgtgcttggaaagttgacaggtattatttttgcgatcttaatgcagatgactgctgttattctgataagctgggtcgtattccgaatgaactggggcaacttgtttgatatttttgttattacggtagtatacgcatttgctataggcagcattgtattgttttggggttttaccgctaaggaccacgtggcggtgtccagtatggcttctccggttctttatatttttagttttttgggaggcagttttattcctaagaacggactgcctgatagcttgagggttgtccaagagatcataccgaacggtaaggcaataaactcttatttaaaagtcaaacagaatattggccttagcggcatgtatattgatttgcttgagctaattggtattggtctcatctttgtctttattaatattatggtattcaacaggaagaaggtggcgtagtagtgcaattgattgccatgattaaacatcagctgaagctgatgctccgaaatagattagcaatttttgcaactatttcagtgccgttaatccttacatttttgttctctttttcccaagatacggatagcaaagagaacttgtatatagccaatgctgataaaagcaactatgctgcaaagctcattgaaatgataaaagagcataaaaatattaaagttataaagctaacggaaaatgaaataaagaaaaaagtcgatgatcaggatattccttttggggtcgttattgaaaaaggttttggaaaggaattggcggacaatcacaagataaaaatgaaaatcatccaaaactatgagaacggcagcggaacattgttagagcagctggtcaaaaatgaggcgggaactcttaaaaaggtagttaaagattcgcaatatatgtctgcgcagttgcatacggactcaaaagatatagaaaagaacattttcaagaaattgaaaaacaattcaggaatagaagtgaatgacaaaacattaagccagggtaaacatactcaggataatgcgaccgtgagattaattggttttcttgtaatgtttatttggtttgttgttattcaagggttaagaacacttattgatgaaaaagagaataatactttcagccgattactaagtacgcctataaactatacaaaatatgttttatccaaaatggctgctacttatatttccggaatcattcatataatcgttataatacttgcgggaaaatacttactcaagatcagcataggtcataacatctttgccatcgctgttatgctcgctgtttatttatttgcattgacctgcattacgatgattatggttccatttatgagaagccaaaagcagtttacttctgccgcatcgatcataattgcagtaagcgggatgataggcggttcctttttctcattggaaattgctccaaaatatatgcaggttatttctaaatttacacccgaagcatgggcaatacagtctttaaacaacattatctttagtaagagtaccttaggaactgaatggcttccgatcgtaatttttgcaagtgtcggcttattaagtattattgtatctttcatcttgataagcagggagattaaaaaagaaaattaaatcaacaataatcggataaaattaacagatcaaaaaggacgtgaggaaattgggtatggaagaactatttggaatggctgaattaattataggtgtactcatgaatgtatttatcggtaaaatcgggcaagttgcttttggaaaagataacagaacaacaaggatcattttaagagtaataggaatcttcctcatcatcaacggagtttcaagagcatttcatatataaaatgagatagtaaaaacatccttttcagggtgtttttttatcgggttattacaaaatttctgaggtgaattatgaaaaaaatattttgtcttccgtatgcagggggatcaagtgcaatatactataaatggagaaggttaatgagtgactctttaacaatacatcctattgagttaaaaggaagaggtacaagaattaacgaagatttttatgaacatatagatgaggctgttaatgatatatatgatctgataaaggatcaaatcagggagtgtgattatgctttattcggccacagtatgggaggccgattagtttataagttatattgtaaaattgctgaaatgcagcagaagaagcccaatcacatatttttttccggatgcggcattcctaaaacgaaaaaagcagaggggatgattcatgctttgccggataatttatttttgcaaagaatcatggatatgggcgggacttcggaagaactgttacataacaaggaattacaacaattatatcttcctattttaagaagtgatttcaaaatgttagaaaaggatgttatttctgaaaataagactgttatggactgtgatataacagtgttgcatggtattaatgacaagacgataagctcagatttaatatgtaattggggacattatactttagggaaatgcaatttttatacgtttgaaggaaatcacttttttattcatcaattttcgaatgaaataactgacattataaataaaaccttgagataaattgttgattgaaaaatcgggagtgttactttgtcccggtttttttatgttaatacgaaaaataaaaactgggttaatgtgcttaggtgtttttccctgctaattgacaactcttaaatatttgtataatatttcttaaagatggctagttcttcttcattatcctttttttaaaaaaagtgtttatacgggtctatatcattaaaaaatggtttttgctgccgataaataaactgtcagactacaacaacaattattggtgagcgttattgcctgtgatgcagtttaacataaaaatccaccgaaagcctctgctgttttaattcagtgaatgaattgaattttgatatcaagtgaaggagtttttgttatgacaaaaagtataaagggagataaaaacagtattggtgagttaaaaactgaagagcattttttagtgggaagtaaatcttctaaagaaaaaagaatgaaaaatcttacatataaattgtcacagcaattaagcgataagctgaatgtatgctgcaatggatcggatgaacgtctgcatgtcgtattaacagcggcactgactttgttaataaatcaatatacagaaagacaaaatattgtaatcaagactcctgttttcagaaagaacagaacgattgattctgagcaagaaattttgactcttaaaaatgctgttcatggtgaagacctattaaaagagatcatacataaagtcgaattcaccgtagaacaggcattggaaagcccccaaaataattctcgaacaagtgataaaatgactggccttccttttgatgtcatgatagtccttgaaaatattcaagaatacatacttaatcaagaaaatcccgctattcatatcctattttcgtttataaaccagaaacaatacatagagacagccatacactataacgaatgcctctattctcaaaatatgataaaagatttgtcactgcgatttcagatgatccttgaagctatgataactcctgaaaatatcagagtgaaagatatgagattcctgaaagaaaaaaataagcaaaagaaaatctttggctgggaagataattattcgaaaattggaacaatttcggaggtgtttgagcagcaggctgatgaatattcggataagactgctttggtactagaaaactcttcaatgtgttacgcagaacttaatcaccgtgcgaaccagctggcacggtatcttcaggagtgcggagtaaaacggggagaccttgtcggaattgctttagaacgctcttttgatttgtatattagtattctggcaatattaaagtcaggcggtgcttatgtgccgttagaccctcaatatccgaagcaaagactatcattcttaatcgaagattcaggtgtagagttgctgattacaaacgaaagcattcagtcacaactcccgcctcacggggacggcgtaatctgtttggatggtatgaaagaagaaattgaaaagatggatggatctaatattggcataaaaggttccttggatgacctggcttatgtcatgtatacgtcaggctcaacgggactgcctaaaggagtaagtattgttaaccgcggtgtgattcggctggtgaaggagactgattatgcggtatttgatgagaatcaaacgtttctgcaattagcttctgccgcttttgacgcttctaccttcgagatctggggctgtttattgaatgggggatgtctggctataatgcctccgggaataccgacggctgatgatattgcagaagctgtaaaaaaatataacattacgactctttggctgacggccggtttattttctctagtagttgatcagcagttagaatcattaaaagggcttcagcaattattggtaggcggagatgtggtttccgttccgcatgttcaaaaagtattagcacttggaaaggtacaagtaattaacggatatgggccgacagagggaacgacctttacctgttgtttcccggtccctcatgattggaaaggcagtacgcttcctatagggaggcctatttctggtacagaaatattcattttagattcgcaattaaaaccggtagcgcctggtattcctggtgagctgtttattggcggagatgggctggcgcgagagtattggcgacggcctgatttaacgaaggaacggtttatatcacaccctttcaataatgatccttcagcacgtctttataaaacaggagacttagtgcgttatttagaaaatggcgatgtggagtttatcggacggcgggacgagcaagtcaaaatccgcggttttagaatcgagcttggggagatagaagcccgattgatcaatcatacagaaattaaagaagcggcagtaacagtaaatcataatggtgatgatgatttatatatctgtgcttattacacttcaaatcataaaatcgcaaagattgaattgcagcactttctgagagactttcttccggaatatatggttccatcgtactttaaacaaatggataacatgcctttgacggtaaatgggaaaattgacagacgggcacttcctcgacctgatatatctcaaatgtccgaaacaaaatatgaagcgccgacaaatgaaacggagaaaaaactttcggagatttgggaagctgtacttggcagggaacgcgtcggtatagatgaaaatttctttgaaatcggcggtcattcattaaaggcttctatgttaatttcccgcatcagaaaaacattcggcacggatataaaggtgaaggagctttttgagcagcctaccatcaaacagttgagccgtcttattcaaaagcgggataaacagaattatccggtcatcagtaaagcgagaaagcagtcttcttatcaagcgtcatctgctcagaaaagaatgtttgccctttgggagacggataaagacagtatcgtttataacttgccgattatgattgaactaaacggaaaattagatgtaaaaaaagccgaatcagttctacaagagattattggcagacacgaagctttacggacaagtttcgatgttgtaaacggcgatgtggttcagattattcacgatacatgggagctcgaatttgattatcagaagctgccgtctgatgggatacgaccatatgtgaagcagtttatcagaccctttcatttggacaaagcaccgttaatcagagccggactcataacgtatgaagaccggaatctgctgctgttagatgttcatcatatcgctgcggacggtgtatcggttggaataatccgcaaagaattcaatgcgctgtatgcggatcataaactaaaacagccgccgctgcaatataaagattattcagaatggcaagtaagctcaggaacaaaagaggcgttaaaggaacaagaggagtattggcttaagcggttaagcggagatctgccgattctcaatctgcagactgattacgagcggccgagagtcaaaagctttgaaggaagccgagtcagctttacggccgatgaaaggttaacatcaagcttaaagtcggtggcgaaagaaacaggaacaactttgtacatggtgctgctggcggtatataatatcatgctttcaaaatacagcggtcagcaggatgtgatcatcggaacggcagagtccggaaggtcagacaccgaactggagaatacggtggggatgttcgtcaataccgtcgccataagaaattttcctgaggaacataaaacattcagagcgtttttagaagaggtcaaacatcatacgttaaaagattttgagaatacagattaccaatttgaaaatattgttcaaaaactcggggtaaaaagagattcgagccggaacccgctgtttgatgtcatgtttacttttgagagtaaggattacggattcggaggaaatgaagagacagcagaatcaaatttactggtatctgaggtcaatatatcaagatttgatttaacgttaactgcaatggaaaccgatgaaggcgttaacttccaattggaatattgcaatcatttattcaggaaagacacagtcgaaagaatgggtgctcattatacccggcttttacaacaggttgtatcagaaccggacacggcaatctgcagactgaatatgataacggatgatgagaaacataaactgctttatgtattcaatgatacagcagccgacttcccgcataataagacaatccatcaattgtttgaagaacaagcggaaaagacaccggaaagaatagcggcagtgtatgaaaataataaagtaacttataaagaacttaacgaaagatcaaatagtctggcgagaatactaatgaaaatgggggtgaaaaaagagtcaatagtaggtattgttgctgacaaatcattagagatggtgttaggcatattgggtgtgctgaaggcgggaggcgcatttttgccaattgatccgggatatccttctgagagaatcaaatacatgattgaagacagcggttctgacattttattagtgcagaatagtcaggctgacaatattccgtttgacgggaaggttattgatttaacagatagttctctttacaccggagatcggcataacctgccaatgatgagttccgcagaacatcttgcttatgtcatttatacttctggaacgactggaaaaccaaagggtgtaacgatccggcatatcggaatcagtaatctcaaaagtgtctttgaacatgatatgaatatcaattaccgggataaaattattcaatttgcaagtttttcatttgatgcatcagtgtgggaaatcagtatggcactgttgaccggagcggaactacacatcctttcaagtcaagtcatcaataattatacattatttgaagagtatattaaccggcatgacattactgtagccactttgccgcctgtatacatcaaccatataaatataaacggattatcagctttaaggctcttaattactgctggttctcagatatctacaaaatccttgaaccggatcgtgaataaaatagactatattaatgcctacggtccaactgaaacgacaatctgctctacaatgtggagatactcagaagctgagagggcgatggcaaagaccattcctatcggtaagccgatcagaaatctgaaagccttcataattgatcacaacaacaatcttgtgcctattggtttagcgggagaattgtgtgtgtcgggtgacagcttagcaagaggatatctcaataaagagaaaatgacgcgtgagaagtttattgatcatccatttgagtccggaactaaaatgtaccgaacaggagacttggcaaggtggcttcctgacggaaacatagaatttttggggagaattgataatcaagtcaaaatcagaggcttccggattgaaactgatgaaatagaaagccagcttctgaaaataagcgggataaaagaagcagttgttatagataagtgcgaccttcacggtgacaaatacctttctgcatttgtaaccgcagaatataaaatatccggagcagctttgagggagcaattgggtgacattttgccgcaatatatgattcccggtgtcatcatccaggttgaacagctgcctctcacaccaaatgggaaaattgacaggaaagcacttgcagaaatagaagagcctaaacatataaaggagcaccttgaagcaccccgttccgaagtcgaacagattctggtaaatgtttggtcggaagttctgaaaattgatgatattggtattaatgataattactatgagctgggcggagactcaataaaatctatactgattgtatcaaagcttcaaaaatacagtctcagtctagaggtaaaagatcttttgcagtatccgcaaataaaaaacctcagtaaacacgtgaaattatataaagctcaaacagatcagagcccggttagcgggagaactgaactggcaccgatacaaaagtggtttatagagaatgactttgcggacattcaccactttaatcaggcattcatgtttcaagtgaaagaaaaaattaatgaacacgctctggcaaagacatttgaattattagtaaagcatcatgatgctttgaggttgatatatacagccgaaaatgacgaaataaaacaagaagtcagagatgtccaagccgcccgggatacttttactctggacatatatgatctgcttgctgatacggattacaaaaatacaatagaaaaacttgccgatcagttacaaagcggaatggatcttgaaaaaggacttttaatgaaacttggtttatttcgaacaatgaggggcgattatctacttattgctatacatcatatggtgattgacggagtctcttggagaattctgcttgaagatatggagcaggtctacaacaatctgcaaaaaggagagccggccgttcttccgccaaaaacggcatcctttcaagaatggacacgtaaattggcggaatatgcaaacggaagtgagataagaaaggaacttcggtattgggagaatatcgagaaaacgaagattaaagaaattccgagagatttcaataaaactgacagtgtatttaaggaaagccgcaccattactgtcagtcttacaaagcagttaactgataagctccagaggaatacaaatgcagcttataacacacagattaatgacatcttgctttgttcactgggaatggcagtaaaagaatgggcgggacttgacaaggttttaatcggtctggaaggccacggaagagagaacatattagaaaatatttcaatagaaagaaccatcggctggttcacctcactatttccgatcgtgctggatatggagcacagtgatgatctgccttattgcataaaaaatacgaaagagtatttaagaagaatacctcataaaggtattggttacggaattattaaatacttgacggcaccggcacataaaaaagacatcagttttacgataaagcctgagatcgggtttaactatctgggagaaatctctcaaaaaaagcgggctgtttttcagcatgcagatatatcatctggtacaagtgtttctttatctaataaaaaattgaatgccatcgaaatcaacagctttattatggacggtcaactgcagttggaatttaactatagtacgaaagagtttaaagaagaaacaattaaaacattaaccgaatcctatataaaccggttaatcgatattattcagcattgcggaatgaaaaaaattcctgaaaaaacaccctttgactatggagatctggatttatccatcggagatttggagcagattttatcaagcggaaaagagatagagaaaatccactccctgactcctatgcagagcgggatgctttatcatgcattgcttgatccgttttcacaagcctattttgagcagcttacattttctttatccggtcagcttgatattggcagattaaatacagcttttaatatgctgatcgagaagtatgaaattttaagaacatgcttttttcatgaaggattaagtaagtttaaacaggctgttctaagagagagaaaagttaaaattgaatttgaagatatcagcactttctcggaatatcaaaagaaagtccggcttaaaaatgtccagtttaaagacaggggaacgagattcgatttgacgaatgattgcttaataagagtaaccgtattaaaaactgatgagaaagaatataaactgctgttcagttttcaccatattattatggatggctggtgtatgagtttaataatgaatgatataaaaactatttatacgtcattaaaagaaggaagagagacagtgcttcagcataccgagccttacagcacctacttagaatggctggataatcaggacaaaagtgccgcattagaatattgggggattatctaaatgaatatgagcagcaagccggtattccaaagttctgctgatgagggcggtttcaataataggaagaaaacattcattattgatgaaacatgtacttcgatgttgaaagctgcagctgatcaatatcacattactttaagtgcattgattcagactgcatggggagttcttttgcagaagtataacaacgtggatgatgttgtttttggtgcggttatttccggaagacaatgcagagtgcaaggcatagaaaaaatggtggggttatttatcaatgcggttcctctgagagtaaaaggcgatggtgatacggtatttatagcattagcccaaaagctgaacagtgactttatcaaagcgaatacatcatacggttacagttctttagcggatatacaagctcttacaaagatgaaagagaaactgatcaaccatatgttggtttatgaaaattatcctgttgatgactatggcaaggcggtcgataatacaactgatgctttaaggattacagatatggaagtgtttgaacagacgaactatgactttgggctggttattattccaggcagccaaatcaaagcagagatgacgtataacaataatgtttatcgtgaagatatcattaatcgtataggtgttaatttctgtcatgtgttaaagcaagtggcaactgatcctacgcgtgtcctgaaagacatcagcgctgtaaatgaagaagagcgcggaatgctccaggattttaataagcagtcctctaattatacggtgaataaaacgatacaagacctttttgaagaacgagcggaaaagacacctggccaaacagcggctgtctatgcaggaaagcatatcacttataaagagctaaacgaaaaggcaaatcaagttgcaacattattaatggaaaaagggcaggaaaaaacagcattacggctatgatgatccgtccttcagaatattcaatgattgggatgctgggaattttaaaaaccggaagtgcgtttctgcctattgatgatgaatcaccggtcagtcggataaatcatattttaaaagatagcaaagctgatatcctcattacagatttgtgctttttagctgataaaaacattgcggcggaatgtttggatattacggataaatcgatttataccagccaaaatacatcaaaccctgatgttcagtatgatctcgaggacgaggtatatgttatatatacctcgggtacttcgggaaaaccgaagggggtgaaggtgaaaaataaatcattagttaattattcattatgggtatgtgatcaaataaacataaattctgacagcaggtcgttagtgacgtcaaaatatagttttgacttatgctataccagtatatttccagttttatccggtggcggacaagtccactttgttgataaagaagtgtatcttcactctctatcattaatagaatatattcataaaaatagtattacatatcttaaaatgacacccactttattttcaacattgatggaggatgttgacatgctggcgtcttgtcctgatttaaaagttattatactgggcggcgaaagcataaacatcggcaacgtcaaaaagctcgctgaaaaatgcagatggatgaagtttattaaccattacgggccgaccgaaagcactgttggctgtattgcacatagcattgatctagatcatattcaaaactgtgaaatatacaatagaataggaagaccaattcacggtattaatatctatattgtggatcgttcagatcaactggtccctgtgggagcacctggtgagatttgtatcagcggggtaggtttagcatcgggatatgtcaataatgaagaattaacgaatgaaaaatttattgataatccttttcatcgtggagcaaaaatgtacaaaacaggagaccttggcagatggatgccggatggaaatatagaatttttaggccggattgacaaccagatcaaaattaggggttttagagttgaaatcggagagatcgaaaaccaactattacagctggaaggtataaaagaagcggcggttgtttatatagaggagaaatatctttctgcatatattactggggacattgagatggaaggctcgttcgtacaggagaaattggcacaggttcttccgaagtatatgattccgagtttcataatacaactgaaagagttgcctcttacagctaacggaaaaatcaatcgaaaagagctgcctcttcctgacttgcaacggttgtcagtacctcaatacgaagctccggcaaatgaaacggaagaaaaactagctgaaatttggaaagaaatgcttgggcataaacggatcagtataaatgaagatttcttcgaactgggcggacattctttaacagctgcgttcactatttcccgcatcagaaaaacattcggcacggatataaaggtgaaggagctttttgagcagcctaccatcaaacagttgagccgtcttattcaaaagcgggataaacagaattatccggtcatcagtaaagcgagaaagcagtcttcttatcaagcgtcatctgctcagaaaagaatgtttgccctttgggagacggataaagacagtatcgtttataacttgccgattatgattgaactaaacggaaaattagatgtgaaaaaagccgaatcagttctacaagagattattggcagacacgaagcgttacggacaagtttcgatgttgtaagcggcgatgtggttcagattattcacgatacatgggagctcgaatttaattatcagaagctgccgtctgatgggatacgaccatatgtgaagcagtttatcagaccctttcatttggacaaagcaccgttaatcagagccggactcataacgtatgaagaccggaatctgctgctgttagatgttcatcatatcgctgcggacggtgtatcggttggaataatccgcaaagaattcaatgcgctgtatgcgggtcataaactaaaacagccgccgctgcaatataaagattattcagaatggcaagtaagctcaggaacaaaagaggcgttaaaggaacaagaggagtattggcttaagcggttaagcggagatctgccgattctcaatctgcagactgattacgagcggccgagagtcaaaagctttgaaggaagccgagtcagctttacggccgatgaaaggttaacatcaagcttaaagtcggtggcgaaagaaacaggaacaactttgtacatggtgctgctggcggtatataatatcatgctttcaaaatacagcggtcagcaggatgtgatcatcggaacggcagagtccggaaggtcagacaccgaactggagaatacggtggggatgttcgtcaataccgtcgccataagaaattttcctgaggaacataaaacattcagagcgtttttagaagaggtcaaacatcatacgttaaaagattttgagaatacagattaccaatttgaaaatattgttcaaaaactcggggtaaaaagagattcgagccggaacccgctgtttgatgtcatgtttgtacttgaaaatgcagattacggtattgaaaatcacttggatccaaatccggaagagcatattcaaaccgagatcaatatttcaaaattcgatttaacgttaaccgcgacggaaattgataaaggaattaagttccacttggaatactccagtcaattatttgaaaaagaaacagccgagagaatgggtgcccattttacgaagcttttacaaagtgcagctgccggcctagatcaacctttaatgaaactggatttgattcctgaacaggagaagcacacattgctccatatattcaatgacacggcagctgaatttcctcggaataaaacgattcatcaattatttgaagagcaggcagaaaaaacacctgaacgtattgcggctgtccaagaagatacgctattaacctataaagaactaaacgagaaatcaaacagcctggctaatcttttgagacaaaaaggaattagagaaaacagcattgtcggaatcatgacagagagatctcttgagatgatcatcggaattatcggggtgctgaaagcagggggagcgtatttgccgatagatcctgaatatcctgatgaaagagtaaattacatgctgaaagacagtgatgcaaacattctcctaattcaaaacggattgtcaggtggtattacattcaataaagaaattttatcattaagtgatcctactctatatatgcataacagaagtaatctgccgaatgtcagttgcccggaagaccttgcctacatgatttatacttcagggactacagggctgccgaagggcgtcatggtaaaacataaaggcgtggtaaattatattcattgggcaaataagatatatgtaaatgatgaagatattgattttcctctgtattcttctatttcttttgacttaacggttacttcaatttatacaccgcttatttcaggaaataaaattattatttatgagggaccggacaaggctcttctgatcagaagaattatagaagaaaataaagcggatattattaagctaacgccgacgcatttgagattgctggagaatgtagatttaagtacgtcaaagataaaaaaaataatcgtcggcggggaagagctgaaaaccgggcttgcaaaaaagatacacggtgcatttaacggtcatgtcaaaatctacaatgaatacggcccgacagaggctacagtcgggtgtatgattcatcaatatcatattgaaagagacaatggcaatgcagtatcaataggcaaacctgcggataatactaagctttatatattaggaaaacaattggaattacttcctttaggggcagccggggaactttgtgtcagcggagaaggacttgcagacggatataaaaataaagcgggcttaacgtcagaaaaatttgtagataacccctttgaacccggggctaagttatacagaacaggggatatggcaaaatggatgccggacgggacaattgattatttaggaagaattgatgatcaagtcaaaatcagaggatatcgtattgaaacgggagaaatagaaaaccggcttctgaaaatgagtcacataagagaggctgttgttgtagcgagagatgaccaacatggggataaatatctctgcggttatgttacttccgacaaaaaaatagatgtttatgctttaaaagaaaatctgtctaaagaattaccgttatatatggtgccaagttatatcttccagattgaaaaaatgccgttaagttcaaacggaaaaatagatacgaaatcattgccgattatagatattgcggatgtattggagtctgcatatgaagcaccgcgaaataaaaaggaacaaattctcgcatgcgtatgggagaaagttctggggatgaaatcaatcgggattaactataactattacgagatcggcggagactcaattaaatcaattttagtagtttccgaactccaaaaatacggcttaaaactggaagtcagagatttaatgaaatatccgcacataaaagacttgagtgctcacgtaaaatcagctgatatacaagcagatcagtcgattgtagaaggagacgttgatctgacaccgattcaaaaatggtttatagaacagagatttgaacaagaaaaccactataaccaagcctttatgctttacaaaaagtccggcatagaagaaaaagcaatcgaaacggcctttttggaactggtgaggcatcatgatgccctcaggatgcagtttaaaaaggaaaacggtgaaattaagcaatggaataggggcattaaacaggcaaaagaaacatttactttagaagtatttgatatgacacaaacagaagatccagccatggcaattgaatcactggctgaccgtatgcagaacgaattgagcttggaaaaggggattttaataaaactggcggtatttaaaaccaaaaacggagatcatcttctattaaccattcatcatatgatcattgacggagtatcttggagaatcctattggaagattttgaaacagcttatcttcaaacagttaatgggaacaaggtggagctggaaactaaaacagcatcgttcaaagaatgggcgcgtcaattgaaagaatatgcaaacagcaaggctcttcaaaaggaagctgggtactgggagaccatagaaacggctattattgaacctcttccaaaggatttcattgccgaaagctgctcttatgaagatagtaaagaaattaaaattgaattaacagaggatcaaacaaaaacacttttaagaaatacaaatgcagcatatcatacacaaattaatgatatattgctttgctcactgggacttgcagccaaagaatggaccggcaacgagaagatccttgtgaatcttgaagggcacggccgtgaaagtgttataaaaaccccggtccatcgcacaataggttggtttacgacaatatacccaattgttctcgatatgacggaaagtaatagtttatcaagctccattaagtatacaaaggaaatgcttagacatatccccataacgggattggttacggaatactcagatatttgtcggactcggttcatcttcaattaaaacctgatatcagttttaactacttgggtgaatttggccaagaagatcgcagcaacctatttcaaatatcacctttgtccgccggaacgagcatatctggaagaaataaaaagacacatagtatagaaataaatggatatatcatggatggcaggctgatgtttacgttcaattacagtgcaaaccaatataaacgagagacgattgagcaatttacgaaagcctatcaattgaaaataaatcagatcatagaacattgtgtgaataagaaaatatctgagaaaactccatgggattatggggatcccgatcttcaaatagaggagctaaatcaaattcttgcaagcggtgctgaagtagaaaaaattcattctctttcaccgatgcaggaaggcatgctgtataacgctgtgattgaccatcaatctagcgcttatttcgaacaaagtgaaataacagttgaaggaaatctgaatacagaagttctcagtgacgcattaaacaggctgattgctaaatatgaaatattaagaacgtcatttttctataacggtttccgtgtatttaaacaagccattttaaaagaaagaaaactaaacattcaatatcatgatatcagccaatgggaggagcagaagaaggatgcctttgtagggcaattcaaggtgagagacaggaatactccgtttgatctgaacaaagattgtctgatcagagtatcggtgatcaagctgggaagaaataaatttaaagtcatatacagtttccaccacattattttggatggctggagtgtcggtatcctgttaaaagagcttatggatctatatggtgacgtggctgaagggaaaaaactccttcaagaatcacctgtaccgtacagtcgttatcttgaatggcttgatcagcaggacaaggaccgtgcatttgaatattggaaggaatatctttctgcatatgaacaagagatctcatttccggaactggaattgaaatctgacgagtatcagcatgatcaaaaactgggagcgcttaacggtgaaaccgccgctaagctgaaaaaaatcgctgagtcaaacagcattacattaaattctatcgttcaaacagcatgggggatattgcttcagaaatataacaatacaaatgatgtggtatttggttccattgtttcaggcagaccgagtgagataaacggaattgaaaatatggtcggcttatttataaatgcagtgccaatcagagtgaaaagagaatgtgatacatcatttatttcattggctaaacaaataaataaagactttattgaagcgaacgaatacagttattgttctctggcagacatacagtctttgacaagtatgaagaataaattaatcaatcacgtagtcgtgtatgaaaattacccgttgagtgaggatcttttccaagattcagcccgttcgagtgtaaaaataactgctgaacatgggtttgaacaaaccaactatgatttagagcttttaattgctcccggtgacgacttgcatatgaaaatcacatataacgccagtgtttacagtaaagaaacggtaagttcaatcttagataacctggttagcatcttacagcaggcagcggctgatcatgaagtaatagtttctcagatcgatatggtaaatgagacagagaaacaaaagctggtgaaagaattcaactgcacggaattatcatataagaaagaaaagacgttacaagagctcttcgaagagcaagctttaaggacacctgatgcaatcgctctggaatggaacggagacttcttgacctataaggagctgaataataaggcaaatcaattggcaagagccctcagggaaaacggcatcaaagagaatgttgtggttcctattttggtaagaaggtctttccgattgattataggaatattaggaatactaaaggcagggggatgctacttaccgcttgatcctgattatccggcagacaggatcaattatatgctgaaagacagtaaaagcggcctgctgttaactgaagaaggacttccaaatgaattaacgtacagcggaaccatatttaacatagattcagaggatttattacatcagttggagacgaacattgatgttattaacagggccgaagatttagcatatgtcatttatacgtcgggatcaaccggaaaaccgaaaggggtcgccgtagagcaccgtgccgttcataactttattaagggaataacagacaggatcagcttttcacaagacaatgtccttctttcggtcaccacgtgctcatttgacatattcggattagagtcgctgctgcctttaactcaagggctgaaagttgtcatagccggtgaagcggaacaaagagatccgtacttgttaaacaagatcgttgttgagactgatgtcaatactattcagcttacgccatccagattaaagctgatgctaagtgcagaaaacagtacggagagtcttcagaaattgaagaccatcatggttgggggcgaggtatttcaacgggaattgttatttgagctaaaaaaatataaaaatctgaagatctataatatgtacggtccgactgagacgacgatttggtcttctgtgaaagacttaaccaatgaaaatagtgtaaatataggcaagccgattgcgaatacacagatatatatagtagatcatgatggaaacactgtaccgctcggcagtactggcgaattatgcattgctggagccggaatggccagaggatatttaggaaaagaagatttgactgcgcaaaagtttgtagacaatccgtttgttaaaggaaccaagatgtataagacaggagatttagcaaggtggctgccaaatggtgaactggacgttatcggaagaatggacaatcaggtaaagatcagagggtatcggatagaattgggagagattgaaagcatagtaaaccaacatgaaaaagttaaggaatgtgtagctgccggaaaaacaaattccgcaggagtccaagatttagttctgtattatgtggcagaaagcactgtatatccttcagaatttattaagttattatcacctgtgcttcctgagtatatgattccgcagatctttatgaaaattgaccaaattccgctgacagcaaacggaaaaataaatgtcctggcactgcctgaacctgttatagatagaacaggttttgaccggccttttgaggaagcggtaacggatgtacaaaaaagtatcagccgtgtttggaccgatgttttaaaaatagaagagcctggaatacatgataacttctttgaagcaggcggtaattcaatcaaaatcgttgcagtttataatgagcttcagaagctgtatccaaaacaaattcaaattgctgacttgtttgcatatccgactatttacagattgtccgaatatatagaatcagctatagcctttgcggagatagcagtgtccttggaaaaagaaatcattcctattactttaccgcttgaatacatctcggaatcaactggacaaagtcatacagccatgcacgaatatgcggtaaatgcgaattattatgatggtttaaaaacaatatgcaatacctacaaatatgatatttctcatgttttattagcgggttatgtatttttattagctgatgtcagccagcaaaacttggttcatatccaattttcgggtcatggagatgatcggatgagtcagctgtcttttgatctgtctgatatcgagaattttcacgatattattcgtatggcgaaggagcagattgagaatcaagaggattcacaatacgatttgaatactcactataagaaatcaagttcggcccaagatgtttttcctcttttttatattagtaatgaatcaaaaaaagagtactcagaattatatgatctggtttttgcagttcatgaaaagccatccgaagcagaaatcgtttttatatataaccatcagaaactaaatgagcacaaaatgaaagatttattttataactacatgaatttgattcaagtgattacagcagacaaagcagacaattcaatataaagcggccggttctgccttacattttgctgatcggcagaatgtaaggcaaatcaggcattatagggactttggaggtatttaaatgtcgaaaataggttttttattttcaggacaaggatctcaatatgcaggaatgggcaaacgtttatgtgacaattttattatcgctaaaaaaacgtatgacgaagccagtgatgcattgggatttgacctgaagaaattatgtatagatggaagtgccgctgagctatctcaaacagaaaatactcagccggccatcctggcaacaagtattgcacaattcagaatctacatggaagaggtcggaaaagaacctgaatatatcgccggccatagtttaggagaatattctgccttggtttgcagtgacgttttggatttccaggacgctgtaaagctggtgagagccagaggattattaatgaaagaagctgccgaacaagggaccggagcaatggctgttatcaggaacctggatgaaagaatagcagaagaagagtgcgaatctctctcttcaagaggaaaaacgattgctgtttctaactacaatggatataaagatgttgtggtatccggagaagcggcagcagttgaagagcttagtgaaactcttaaagccagaggagcagacatttttaaattaaatgtaagtgctgcttttcattctccgatcatgggttttgctgcggaaaaattcagccatgagttaaaaaagtatgatctcagaactccaaaatacaaagttttatctaatgtgacggctcttccatattcagataaacagcaaatggctgacatactgggaactcaaatcgtaaaaccggtaaattggatgggaatcatgaagtatttagaagcaaatcatactgatactgtgattgaatttgggccgaaatctgtattaaggaatcttgtaagaaacaatatcgctgacatcaaatcgtacagctacgacaaagaagaggacgtgaagattataaaagagactcttttgaacgaatctgtttcactgcaagccggtttttctattatctcgagaagtttagggatcgcggttgctactaaaaattacaactggaacaatgaggaatacgccaaaggtgtaatcgaaccatatgaaaaagtagctgccatacaggctgaacttgaaacatcaggtcgtcagccgtcaagagaacaaatgcatatggcagtagaaatgctgaagtcagtgtttcgaacaaaaaaaacccctataaatgaacagaaaaaaagatttaatcaattattttctgaaacaaacacaaaaaaacactttgaagactttgaagtttgacaggtatgatcacctatctagtgattctcagcgaggtaaaaaaatgaaaacagactttataagtttaagtaacttaaaagcggccgcttttacaaatcaaactcctaatgtaaagaaacaaaaaaacgaggaagggaccaaagacatttccggagatgacattgccattgtcggtttatcatgcagaatcggcgaagccaatcacgtaaatgaatattgggatttacttttacaaggaaaagagttcatcagagacattcctctgaacagaaaaaaagatgctgaccagtcattaaaaaacagcggaaccaagtacagtaaagatgcagcctatacaaaaatagcctatatggatgagattgataaatttgattgtgactttttcagtatccttccaaatgaagcaaagttgattgatcccagacaaagattatttattgaaacggcctggaacgcattggaagacgggggttacggcggcggaaaattatgtgggacaaatacgggagtatacattggactcagcagtgacggctcaaatgaatacttcagattgcttgaaaaaggagatcaatcattactcggactggctaccgcgggtaacattaaatcagttatcgcaagcagactgtcatatatcttggattttaaagggccagcaatggtaatcgatactgcatgctcttcatcgcttgtcgccctccatacggcttgtcaggcaataagaaataaggattgcgatatggcattagccggcggagtgaatataaaagtattcccaaagacaatagaggagagcaggttaaatatcgggaattcttcatctgattttgctgtaaggactttcgatgattctgctgacggcacgaatagcggcgaaggagtcgctgccgtattgctgaagccgctggcccaagcgattcgtgatcatgaccagatctatgcagtcattaaggggagcgctgttaatcaggacggcagctcagtaggaattaccgctcctaacgcagcagctcaagaacaagtaatagtagatgcgtggaaaaatgcaaaaatagatcctaaaacaattacatatattgaagctcatgggacagggaccaaattaggggatccgattgaaataaatgcgttacaacgggctttcagaaaatatacagaccgaaaacagttctgtgcagtatcttcagtcaaaacaaacatcgggcatcttgatagtttggcgggaatagcgggtttaattaaagcggtaatggcattaaagcataaaaaaattccgccaagtttacattttaaagtgccgaaccgaaatatcaattttcatgaatcgcctgtttacgtcaatgactccgtttcagcatgggagagcagcggagtatacaggtgcggcatcagcagttttgggctgagcggtacaaactgtcatgtcattttagaagaggcacccgcagttgaaaaagtcgatcaatccgttttatctgaacatatttttactgtatcagctaggactaaaacatctctcgcgcacttgcttacagatcatattgattatttaaagagagaaacagatgtgaatctgggagatatatgttatacagcaaacactgggagattgccaaacaaatacagactcgctatggtaataagctctgtcgcggaactgctggaaaagctggagtttttatcatgctctgaatggaaaacgtatcgggagaaaaatatatactttcaatcgataacaaatcaaacaaagtttataggaaaaacgcatacagacagtgtgcagaatactcaaacaataaaaaatgtgattcaaagagtcagacaagacgtctctaatattccaacctctgacttacatattttatgtgaaatgtattgtgatggggcgaatattaactttgaagatctttatagcgagatgaattttcaaaaggtcagcttgccgacatacaaattcagcggaaaaagattatgggctgagctggctgcagacggcccttcagccgatgagaaaaaacaatctttattgagcaatcttgcagtgcagtcactgaatctggaagtgtatatatcccatttgaatgtcactgattattggtttttaaatgaacataaagtgaatgattcttacgttatccctggaacggtttatatagaaacagctagagaagcgggaagaaaatacttcggcgaacctgtcggcattctgttaaaagacgttacgttttcaaatcagttaaaggtaaaagcaaatgaagttaaagaagttcatacgatcataaagaaaaaggacagcgttttagagtttagtgtgataagtaagaccggcgataaatggataaaacacgcggaagcggtcattgcgaaagaagaaccggtacgggaaacatatgacattgaggatttaaagaaaagctttaattctgtttatgtcattcaacgtaataatcatccattgacggaaataaacaccgatgaatacaagtcggtttatcatatagaagataccaatagaccggaaagcatcgttcaagtcggaggcagatggaaatgcaccaacgcaatctacagagacgacgacaggcttctatgtgaattggaattgccgaaagaatatgagagtgatttcgttcagttttcgcttcatcctgcgatgatggattgtgccgttaatgccgggacattcacaatagataacgaaacctatctcccttatttttataaagaatttaagatttatggctctgcttctaaaaagttttacagttatatcaagaaaaagagccgaagcaacggggaaacaggaacgtttcgcatcgtcctgctgaatgacactggagaagttttcggtgaaatcaacaattacatcgtaaaaagggtgcataaagcagctgaaaagactaaaagaaacaatatatatcataagctatcttggataagagaaagcgatcaatcacacgagatgcgagaaattcatcatcctattttattatttaagaataatggctgcagtttatccgaggaaatcattcgaaggttagaactggaagggaaaactgtgattgtcgcggaacagggtgactatttctctaaaatcggaagccatcattatactgtcagtgattctcaagaagattatgactgtcttgtaaaagctcttcaaagtgaaaaggtttctcagattgtccatttgatgtctatcagcaatgagaaagacaaaaacatatatcagcttcagaaaaaaatatcctcaggggtagacagtttattttatttaacaaaatcacttgtagaaaatacaaaaaataacatagaactgatgctgtttgcagaccttgcacatcaagtaagcggtgaagaaccagacattaacccgcataacgcggcatttttcggttttggaaaagtaattgaaaaggaatattcgcgtgtaagtgtcagatgcatagatttggatcaaaatcttatggcggaaagcatcttgtttgaaatcaactcaaaaaaacagtcagagcttgtcgcttacagagaccggcataaatacgttcaagagctccagactgaagacttatccgtaattcgggaagggaaaataagcatcagaaagaacggtgtatatgttattaccggcggtatgggcggactgggattagaaatggccaagtatttatcatcaaaagaaaatgtccaattaatcctcattggacgctccgagcagcagatcaacatggagaagggaaacaacaagaaaatcgatgctctaaaagaaataaaagaaagcggttctaaggtagattactataaggcggatgtcgcaaatgaaagtgaaatgattcatgtattcgaggaaataaagagtaaatacaatacaatccacggtgtcatacatagtgctggtgtttctggagatgggtttattttcagaaaggaaaaaaaagtgtttgataacgtgctcagaccgaaagttaatggaacatggatattaaacgagctgacaaagcatgagcatctggatttcttcataatgttttcttctatcacagcacttgcggggagtatggggcaggctgattatactgcggctaatgcctacctggattcctttgcagaacgcagacagcgaagaagaccggatgaaaaaacagttacgattaattggtgcggctggtcggatgtgggcatgcttgccgaatatattgaagagcgtcaaaaggccggaaacgaacataaagatgaaaacggctttaagacgattacctcagctgaagcgatacgtgccttcgatgaagtcatgcaaaaggacatccggaatgtgatcatcggggaaattgatcatcgggtactggaattaaatcaagatcaaattcatttccgattatctccggatattttgacttttaaggagcaggcgattgtaaaaaaatctgttgagtcgaaaaccgatcagacatttagcttcagcgatattgaaaataaactaatgaaagcttggataaaagttttaggcttagaacaaatcagtataactgataaattttatgatttgggcggagattcaatatccgcgatatatctggtaaaagaaatagagaaagaatggccttctctcattgatgtttctgatatttttacgtatccctccattaaggagatgtcaacctaccttgaatcccacttcagtgatcagaagtcttctgaccgaatccctgaagaagacaatgaagatgacctggatgcaattttgaataagctggcatccggagagatggaagtcagcgaagcaaatcaaatatttcatccagaccgaaaataactgaattgggcctgtaagaatatattcgcaaaatggatattggcaggctgcgaattgaatgaagaaaaagcagcctgcctatcctatcacattattacgggaactgaattccattttaaggtaaaaatgtagatcttattacccttcctatcaaaaattttcttagaaagaaagcgggagtgatccgtaatgaatagcgttcaatcttatatatttgaacaagtgaaacagcataagctaagccagaaagaagcaaagcgaatgctaaaagaattaaaggctgcaagcagcaatgaagatattgctatcattggaatttcctgcagactgccgaaagcaaacaatacagatgaatactggcagaatctgatgaatggagaagactgcaaagcggaatatccaaaagatatgatcaattacattaaaccgatcgtaaacaataaagggtttactgattttctcggttcaggatatctgacggaagaacaagcagataactggaaacctggcggatatttagaagacgtagacaagttcgatcctgaattttttaatatttctcctaaagaagcaaaggccattgacccgtctcacagagtattgctggagacggtatggactgcgattgaagatgcagggtatgcaggggacaaaatttatggaagcaacacatcgctctttgttggaaaagaccatgtcaataatacgttgtaccgctacattacagaatcagaatcgacaagtatgacgggcaactggccgggtttgatggcggggcggattaattatttattaaatttaaaaggaagttctatggttttggattctgcttgcagctcggggctgcttggtgtgcatcttgcctgtaatgctttgaaaaataaagaatgcgatatgtctattgtcagcggaatttcattaggattctttccgcgcttcaaaacgtccaaaaaatcaatgatggaatcagtaagtgataaagtacactcatttgataaagacgcagacgggacatttttcagtgacggagtagctgcagtcatcttaaaacctttaagtaaagccaagcaggacggagatcatatttatgctgttatcaaagggagtgcagttaataatgacggggcctcaaatggattgacagctccaaatgccatcgcccaggaagaagtactggttcaggcatgggaaaatgctcaaattgatcccgaaaccattcaatatatcgaagcgcacggtacaggcacaaagcttggagatccaattgaaataaaggggatttccaatgcgttttcaaaatatacggacaagctgcagttttgcgggatcggatctgttaaatctaatattggccataccgttgccgtttcgggtttggcgtcacttatcaagatcgttctgtctatgaagcatcaagtcatccctccgagtattaattttaaagaaccgaattcattgattaactttgtgaagtcacctgtatttgttacagacaaagcccatgaatggcctaaaaataactcaccgaggagagcgggaatcagttctttcggctttgtggggaccaattcacatgtagtgattgaagatgctggagatgaggttgaagaggtcattcctgcaaatgaaacatttgagatatttactttatcagctaaaacagagaattctttaatgaaactcatcaaggaatataatgaattctttaaaaaaggaactcaaaaaaacgtaaaacatatttgctatacagcaaacacagggcggggccattacggctaccgattggctctgattgtaaaaagttacgaagaattaaagagaaaaatcggcaggcttgcagggcataacctgaatgaaatatcagaaaaaggcgtatatttttctttccataaagttggttctgatagaaaacagattatggatgaaggagaaatttccttatctgaacatcgcaaaatgaatgctcaatctgacaatttgatacatgacattcttactgaaggggatgaatatttactgctaaaccttacggaaatttgcaacctgtatgtcagaggagcaaaagtagaatggacaaaaatgtacaaggatgagcgcagaaagattgtcagtcttccgacataccaatttgaaagaacattatgctggggagaagtaaaagacagaagaggtcaagcgccgcatcagaaaaatatcagtcacccgctgattgaccagtgtttggctgattcaatgaatgagacgatctattcaacgacatttaatgtgaataaggattgggttttaagtgaccataaaatcatgggggcttgcgttattccgggaacgacttatatcgaaatgggaagaagagcaagtgccgcttactataaaagcaatcaattagaattacgagatattatcttcttcactccgttaacagtaaatgaggatgagaataagattgtacacacaatcattaagaaaaagaaagaatgtattcaatttataatagccagtcaggaaggagaaacctggattacacatgcagaaggaaaagcgtttccattaacagactctgtatcaatgtttgatttagactctgttaggaatgacagtaatagagagaagataaaagtcaattatgaaaataaaaatggtttaatcagcaaagtctttactttcggaccgaggtggctgaacttcaaagaagtcatactgggccctgatgaacaattggccgaattaaaattggctgatgaatttacagcagatttaaaagacgtctttttacatcccgctttgctagataatgcagtgaacgtgtttattggagaagatgatgacgatagtacattccttcctttttcatataaaagcgtgaagatttactcaagaatgccgcagcatttttatgcatttgtcaaaaagaacgcaagcagtaaagagacaaagctgtgtgatattcagttaatagatacagaaggaaatgtttttgcagaaatcaccgattatgtattaaaaaaagtaaatcggattaatgccctttttgaagaaagttctgaatcactttatcaattaaaatggatggcgcaagaagcttttgaagaagaaaaaacagaggtaacaggtcctatactgttatttaaagacaacatggaaatttataaatctatactggaacagttgaaaattcatgacgatgatgttattgaagtggagtttggggatgaatttcagaagataaatgggcggaaattcctaattagcggatcagaagaagactatgttcaattattgcatagcataaacgatcaaaatatcagcagcattatacatatgtcttctatcagccgccaaggaacggaatcattaacagatttagaagacatgcagaataaaggcgtatacagcctgttccgcttagtccggggattaagtaagaataagatgaaaagcaatattaatttgcatcttatttctgatcttgtgacagaagtgtccggagaagaaaatacaatcaatccattgggcgccgcgttgtttggtctgggacgtgttatttcgcaggagttccaaaatgtttcatgtaaagcaattgatattgatgaacatacttcaccggaaattattagtgaggagttaagaacaaaagggaaacactatcaagtcgcctttagggatggtaagcggtatatcagtcggttggatacggttgaaccgataaaggataagaaacacggcggtatggagattaaagaaaacggtgtctatatgattaccggcggcaccggcggaatcggtttggagatcgcaaagcacctggctggaaaacataacgtcaatgctgtattgctcaatcgctctaaactgcctgatcaaagccgatgggacgatatcattgctgatggaacggatttaaagctttgcagaaaactgaagtccatcagagctatcgagtcaatgggttctaaagttgattgctacagctgtgaagtttctgacttaaacagcatggagccggtaattgaagaaataaaacagaaatacggtacgatcaatggcgttttccattgtgccggagttgccggggacggtttcctctttagaaaagaagctaatatttttaaagaagtgctcgctcctaaaattaatggaacatgggttatcaatcatttaacgagagacgtagatttagatttcacgattttgttctcctcaattaattctattttcggaggtgccggacagggagattatacagctgcaaatgcttatttagattcctttgcttatatgcaaaacaaacaggggaaaaacacgctgtcaattaactggccggcttgggatgaggtcggcatagctgtcgattatggaattactgatgagagctctattttcagattattgacggtagaaagggctatttccgttttagaagaaatagcatcgaataagcttactaatatcattccaggtacattaaatatgaagctcctcgcttttgcgaaggatgaattgtcttttgaattatctgagcaaatcaaaaacaaattaatagataaaaacaggacaaaaaacgaagcagaaaaacgtcgaagaacagatactgaagatatagtgctgaaaggaaagggagaactttactctgataccgaaaaaagtattgcgcaaatgtactctatggttttggatatgcaagagctggatttatatgaaagctttagtgccatgggcggcgattctattatggcaacccaactgttaaaactgataaatcaacaatatcctgacattgtggatatatccgatatatttacatattcctctgtagtggagctatcagagtatattgacaagcagctgaataaagatcatcagcaagaaacggaagaagatactgctgaaaatcggcttgagcaagaactcaacaatctatttgacgacctggagaacggcaaaatcaatatacaagaaggattgaaaattctagaaaactagtttcggaaaaggggaaaattaatgaagaatacagaagaaaacaagactgcaatcataatcggaggcggtattgcaggaatggccgcgggctgttacttgcaaatgaacggatacagcacgaaaatttttgaaatgggcttgctgccgggtggtttatgtaccggctggaagagaaaagggtacttttttgacggttgtatcagctggctggtcggttcaggacctaacaataccttccataaattttggaaagaactgaatgtaatacaaaatatggaattcattaatgatgaagaatttgcggttgttaactttagaaatggtgatacatttacgctgtatgctgatgtagataaattagaacaggagtttttaagagttgcacctgaagatgcggaaacaattaagcttttaactgatggcattcgagttgtttctgatgtagagctggatttggataaagcgcccgaactgttcgatttagcagactttgaggccttcaaagcaaaggctggcccttacatgaaagtaatggggcaatggggaaaagtgacgatcaaagaattcgcccagcgctttaaaagcagttttgtaagagaaaatgtaaatcgtctgttttggtttaatgtagatacccctatatcttactttatggctactttaggctgggctaatagcaaatcttcaggacatcctgtagaaggttctctgcaattcgcaaaaattattgaagccagatatgttgaattaggcggtgagattcaatataaatcacctgtttctaaggttttagtagaaaatgataaagcgatcggaatagagctgaaaaacggacagtgtcattatggagatatcgtcatttcagcagcggatggctataaaactatttttgaaatgctggatggaaaatatacagatgatgaactgacattttgttatgacaaccttaaaacaagtgcaccgcaaatttatgtcggattgggcgtatcaaaaacgtttgaaaaatatcctcattatttgagtctggaattagaacagcctcttaacgcctatggctgtgacaacgttaaaaacatatttgtgaaaatatataacgaaaatccttcattcgcgcctgatggcaaaacgagtattatcgtgtatgcgaaaacttctgctgaatactgggagactttgcaaaaaaacaaccgcgaaaaatatgaagaagagaaaaaagcaattgcgaatgtaatgattgatgaattagacaaatggtttggtgaaattaaatcaaatattgacgtgactgatgtatccaccccatatacgatcagaagatacacaaataatagaaatggaagctggcagggctgggaaaaacagatggaaggcatcatgcacgagaaaaaactgaaacgttcacttcccggacttaaagacttttatatggttgggcattggagtcaagtgggaggaggtcttccgagtgttgtcttacaggccagaaatctggtgcaggtgttatgtaaagaagatggaaaggtttttgagacaaaaattaactaattcaataagctgcttcaattgaagcagctattctatatatccatgatgcttctcatattttatatagaatcaaaatcgataggggtgattaatcgtggatgatatttcgattataaaacaatatgtattggagcaagtaaaagagcaaaaaatggacagggaaatggctttgcgcattttaaaaggattatctgataagtccaagaaaaatcaatttgatattgccattatcggcatatcctgccgtttctcaaaagccaataatgcaaaagaatactggcaaaacattatgaaccgtgcctcatgcatccgggacttaccggagaagcggcggaaagatattgatccattgctgcccagtgcgaatgagaattcttattttagagcgggattcttagatgaaattgataagtttgattcatcatttttcagaatttcgccaagagaagccatgcttatggatccgaaacaaagattgtttttggagacagtttatcacgctattgaggactccggttatgcggggaacaagttacaaggttcgaatacaggtattttcgttggacatgatcatagcggtgacttgaagttttcctatgcttccctagtaaaggatgcggatatgattgcaatgacaggtacttatcccggcatattggcaagcaggacctcctacatttttaatctgaaagggccaagcttggttgttgatacagcctgctcttccggactcgtttcggttcatcttgcttgtgaggcacttaaaaatgaagaatgcagcatggctattgcgggaggcgttaatttatttctgagacctgaaaatataggtacgatgagcgaaatagaagcggaaaacgctaaaatcagcatttttgataaaaatgcaaaggggaccgcatggggtgaggggatttctgctattgtattaaaacctttacatagggctatagaagacagagaccacatatatgctgtcattaaagggagcgctacgaataatgacggggcttctaacggaatcactgctcctaatgctgaatcacaagagaaattgatttcacgtgcctggaagaatgcgaatattagtccggaaactatttcttatattgaaacacatggaacaggcacgattttgggagaccccattgagatcaaagggataacgaatgcgtttaagaaatataccgataaaaagcagttttgcggtataggttcagtcaaacccaatatcggccatacagtcggggcatcaggcatggcgtctctcattaaagcatgcatggctttaaaagagaaggtcatccccccaagtatcaactttaatgaaccgaatcctttaattaatttttcgaattcacctgtttatgtgaatgacatgataagaaattgggaaaaaggagagacgccaagaagagccggtgtaagttcgtttggcttcagcggaaccaactgtcatattgtattggaagaagcacctgaaataataggtgagactgaacagagacaggtaaaagaggtattcactctgtctgcaaaaaataagtccgtcctgaatgatatagcatcaaagtatcttcattttatctcggaagaaaacaatttgaatctctctgatctttgttatacagcgaatacgggaagaaaacatctggagaatagagtgtgttttctcgtaaaagacatcgaagatctgaaggaaaaacttgaaagtctgctcgaagcgccggttcagcaagaagaagctgcattttcttataagaccgatagagatctaagtaccgctgctggaaaaaaacttaaggcttataatgcaggcgggagaacagatgagagtcttctgattgatataagcaagctctatgaaaaaggtgcagagatcgattgggaaatgttatatgaaggagaaaaaagaagaaaaatcagcttgccgggttacgcatttttgcgggagagacattgggtgaaactgcctgaaaaattaccgataagcaatgcaccagataacccttcagtcaacaagcctcaaataataagactgagtggcagggaagacggctgttattcagaaacagagctaatggcaggacaaatttggggaaatgcccttggaatcaatccgatcgatgttacatccgatttttatgaaatgggcggagattcaatcatagcaatagaaatcatcaactttatcaataaacagcaaggaacggagctttcagtttcagacttgctaaagcattcgaatataaaactcttctcagcttatttggatgaatattctctgaggaagacaaatgatgtgaatgtgattcccaaagcaggcgatttagagtggtatgaggcctcatctgcacagaaaagaatttttattctagatcaattaaataaaaacagcacttcttataatatcccgttctttttaatgattgaaggagagttggacgataaacgtttagaagatgcgtttaaaaaattaataatcaggcatgaggttttaagaacgtccataggtttaagggacgggcagcttgtgcaaatcatagaaaaagacgtccgatttaaaatggatagaatcaagacctccgaagaagaattagagagccttatgtctaattttgtccgcccgtttgatgtagaaaaggctcctttactgcgtgcaggattagccgagattagtcatcaaaaacatcttttaatgatagatttacagcatattatagcggatggggcgtctatcccgatcttccaaagggaattgataaatttatacgaaggcaacgaactgccgtcattgaacattcaatttaaggattttgcgatatggcaaaatgaattatttcatactgaagaaatgaaaaaacaaaaagatttttggttaaatgagtttaaaggagaaattcccgttctcaatctgcccgcagatttttcaagagaagccgaacgagatgatcaaggtgaacgaatctatttttatgcaggaagagagctgactgccaagttaacagaattaaacgcaaaacaaaaagtcacccttttcatgactttaatggcttcatttaatgtgcttctccataaacttactggtcaagaagatattattatcggcacacctgtagccggaagaaagcataaagaattagaaaacatgataggaatgtttgtaaatacgctggcactgagaaataaaccatctgccgacaaaacattcaaagaactgcttgaagccgttagggataatgcgcttctagcttatgaaaatcaagattatccttttgaagagcttgtagaccatttgaaccttgagagggatataaaccagaatgctcttttcaacgttatgtttgtccttcagctgatggataatccggcaattgaagtaaatgggctgaaatataagccgtatctttatgaaaacaaaacagccaaatttgatcttctgcttcaagcatttccttcaaaagaggatatcaagtttgagttcacttattcatcaaacttgtttaagcgcacaactgtagaaaaattctcacagcgattcttaatgatcctcaatcatattgttgaaagtcaagatggactaatcggggagattaacattttagaagaaaatgaacgacgcgaaatattgagttacagtggaagatcactgagaagcagaggcacagatgcatctatctgtgagctttttgagaagcaggcggaagcaacgccgaatcaaatagctgtgtctgcacaagacggaagcttaacttatagtgagctgaacaaaaatgcaaaccggcttggaagagcactcattcaaaaaggtgtcaaaaagaatgaagcagtaggcatagctgcagaccgaaccactgattttatcatcggaataatgggaattttaaaagcaggagcagcttatctgccaattgatccatcatatccgcaagaaagagttgagtatatgctcaaagacagcggggcccgtttgttactgacggatcgcaacaatcatggtcaaaggtacggagtagaaagtgtttgtctgaatgaattggaaacagttccagacgacgggaggaatgttaaaggaggaacggaagggcatagccttgcctatatcatctacacttctggatcaacgggacacccaaaaggtgtgatgatcgaacataaaagtatagcgaatttaacagaagccctgcatgaacgtatctactgcaaacatggcgggcagcagaatgtagcgttgttggcacccttttcttttgacgcttctgtcaaacagattttttctgcactgcttttaggacactctctttacatcgtctctgaagaagccaggcatgatatcacgaaacttgctgaattctatatccaaaataaaataactatttctgatggaacaccagcctatctcagcctgctctctgagtctccgcagtgtggccgtataggtgtaaaacattttattataggcggcgaagtgcttaaacctgaagaagtaaagcgtttctataaagtatttaaaaagaatgaccgtccttatataacaaatgtatatggaccgacggaatgctgtgttgatgctgcagcttatacgataaaccaggataatatttccaatataaagagaatccctatcggcacaccgataaaaaactgttctatctacatactagataaacagcagaagcctgtgccgccgggagttatcggagagttatacatcggaggggaaggagttggacgaggctattgcaatcgtgaagaactaaccaaggctaaatttatcccggatcttgttcattctggtgagaaaatgtataaaaccggagatttaggcaagtggaatgaggatgggaatatagaatttgccggaagaatcgaccgacaagtaaaaatcagaggatttagaattgaactggatgagattataaacagactgctgtctcaccgcaatgttcaagaagcggttgcgattgctcacaatgatcagatatatgcctatacagtatgtaaagatacgcagccgccttctcagctaaaagaatacttattggaatatctgccggaatatatgatcccgacagtcattattggcatagataaaattccgttgacgaacaatgggaagactgatgtaaaacgtttgccgcttccagctgaaaataatgccgagctgcatcactttattgctccgagaaacgagattgaacgaatcgtcagtgaggtttggtccgacattcttgaagtttctaaaatcagtataaaagataactttttcgttttaggcggagattcaattaaagccatacaagcagcggtcagaatggaaaaattcaatcttaggctggaagtgaaagacatctttcattaccagacaatcgaaggagtttcgaataaagtcagttatataacagcggcatctgataacagtgtgataacgggagaagcccgtcttgtgccaattcaatgctggctggctgaaagccataatgatactctgcaccatcggaatctttcttttatgttatacagggaagccgggtttggcgaagatattgtaaaagacattttcacccggattattcagcatcatgacagtctgagaacagtattcaaacgtaaaggcgatagaatggtacaggtaatcagaggcctgacggacggcgacttgtttgactttcatctgatcaatgcaataaacatgccgcaatcagttttaaaaatgaaaataaatcaaatacaagccagtatggatctgactcacggcccgcttgttaaattggcactcattaaggaagcagatggggaacatctgttaatcgtcattcaccaaatgatcattgatcatatgtcttggagaatactgcttgaagattttaatacagcatatcagcaagttaaaagtaacgaagacattgtattaccaaataaaaccgattcgtatttaaaatggtctgattatctctataaatatgctgaaagtgaacggctgttgtttgagaaagagtattggacgaaaatcgaaaatgtttatgctccgtctattccggttgatattcaggggcaaattgccaaagtcaaagataacagacaagtgtacaggcagtttaatgttcgggaaactgaaaatataatgaatgcgattcaaggacaagatcatttcactattgagactgttttgctcacagctttaggtttgacagtaaaacatcaaacaggcagtaatacatctctcgtgcacttaggcaaccatggccgcactcatcagagtgagaagcttaatatctacagaacagtaggcagattttctgcaatctatccggtggctttggaggtctccgattctgatcatatcggttcgagtttagataatgttaactcgaccttagccaatattcctgatcaagggataggatatggtattttaagatatttaaaacaagatataaaagagaaatcaaaaccagacatttcatttaattatatgggcgaatttgataatgaactgcacacagaaagctttacggtatctccgctttcaaccgggaatgatataagtgaagatgaaatttggaattacaagtttaagtttattgtgttggtaagagagaaaaaattgagcattggaattgaatataatcaaaatcagtactataagagtactgtagaaaatctgctcaatcagtatatgcgttatatcaaaaaagcagcagaaaccatttaattaatcggaggttaacgtaaatgaccaattcagttcagcaagataaacaagtaccgaagaaatatcctcaggccgcagtcatgcaaatggtttcagggctggggttttccctggcagttaaaacagcggtagaattggatgtattttccgcctttcaaaatggaccagcttcagcggaagcgatagctgaagcccttgaattgaacccctctgccttattcaggctcttaagagcgctggaatccgtcggtttggtcgcccaagctcaaaatggctattatgatgtaacagagtatggtgccactttgatgcctgggaaagcaaaatccattgagcctttggtagaatatctgctgcatgaaacagtagtgcagtctatgtttaaaatggattatagtatcaaaaccggcaaatccgcttttgaagccatttatggtgataaatggtatgagaataatagtcttgatcaagattacttaaaaacaatggataaggcgatggagatttattcaaaaatgagtctgccatccatattgaaagcttactcatttgaaaagtttgatgttatcgtagacgtcgcgggaggaatgggccagttaataacaggcattttaggtgtggctcctaaatcaaaggggatattgtttgatcttccaaaaacgatacaaagtgcaaaaaagcatttagcatcttcagagatgagcgaacgctgtcagtttacggaagggagtatgtttgaggaaattccttccggcggagacttgtatgtgataagcaaagtgttaaacgattgggatgatgagcatgtggttgctattcttgaaaatatagccggtgccatgtctgatcattccaagctgattatagttgaaaatgtgcctgaagcagacaggctgtcccctgaagaagcttttcgtgatttattatttttagtatgctctgcaggcggcagagtcagaaagataaccgagtttgaacaattgattgaaaaagccggattaacactattaaatgtaattcagactccgagtaaatacacaattttggagtgtggaaagaaataatgttatataagctatctcctttaggagatagcttttttatataaaaagttcaccaatttgactgattgattctgtctatctattgatttctctgataaaatgaaacttataatatttaacataattataaatttgaaccacaaggaggaagaaacatgaaaaagagactcgttatgctatttgccgcggccgccgctgctttgttgcttgtgagcgggttgtgggttccgtcagcgtctgcggcgccggctcctgctttaacacaaatccgtattatcggtgtgacgtctgacggtcagaattaccaatgggaaaatatcggtccgaaccaaatcagcgcatcaaaaccgatgaaggggacaacgggttatttagccgtatatttccaagggtatccgaacaataatacgatccaggcgtttaacaacggaacgaatattacaaatcttacgtcaaaagcgctggaagatgaatatacgaaaaacggcaatatcgttacaggctatattaaatattacagcgttcctctttcttatgtcagttcaggaacgttctctttctccgcaacggggctgaacgggccgtacacgccgttaagcagcggatttttctccattcaggtacagagttaaaacagccgcccggtgctttcatgtatagtttttctctctttccgggaagctattcctaaagaaaagggagggcttacatgatggacaggacactcggatatttgcgcgagtcgctttcgaaccacttggagcatgatgtgtgccggggggtttataaaaagcttcaggtgaagcattatgcaaatgagggcgagttcgtgaaagatctaaatgatctggaaatggatgcgctgaatcaggtgcttgaaaaggaaatcaaatatgctgagaacgagcaggatgagaagcgcacgatggaattgaatgaagtatatgagcttctattttaaagagcctcccggcggccgggaggctttttattgtttcggaaccagtttacagaatcatccaaccctttgtataatggatagttgtgaaaaacacagacggaggagaaacatgaacgaaataaaaaaacagacggttcttgagttgtcatcggttgaaaaagctttggtttatctggtgccgccattattggggctggtcatcggatggtttctgccggtcattacgaagtgggccgtaacattggattggctgccttttcacgggccgctggaaataatcgcttcctttcacggatggaaggctgcggctgcaaccgccgttatcggcttaattgggggagtgtggctgacgcgggcagcttttaaagaaagtcttgtggcagtcgtgacggacagcggggtgtccttaaccatatataatgaagaaagcgtgttttcgaaagacagcatttccggtgtgtttacggatgggaagtatcttgttttattaggcactgaaggacaggagctttttcgggagaagcttgagccggcggttgaaaaagcggctgatgcgtttcgcgcgcatgggtatgtctggctggggacggaagatccttttaaagaagaatacaaacggtgggtgccggacacgccggatttggagcccggggcaaatgctcttttaaaagcgagagaaaaggcgctgaaagaggaggaaaaggctgatgcgaaagagctgaaagcggaaatatccaaactgggcattaccgtgcgggagaaaggatcgcgccaatattggcggatctataaaacgccgtctgcataaaaaaagctgccgccgtttgatacggccgggcagcccgggcacagattatttcttcttgtcatcataatattgaaccgggtacatggagccttcggataccattttgttatcttcaatatcttcgggatgcgggttgcctgctttgttgacggggaatgattcaatatcctgcttcccggagagcgatgttttcatattgcggataaagttcatcaccttttggcggtttgatttatctttgagcaggtaggaagtcactccgacagtcgacacggcaagtcctgaaatgagcagtttttgtttcacgataaaaactcctttctatttatggcttgcagtagttattcccgcttaacggctgtttaaacatcggaaggttaattttggcttgccgctttaatgcgataaagattgacaaaactattttcagaataatattataaatatatgatagcgctggagtcatattttaattgaaaggtgttaactttatgaatcaattacatcgcagaatgggaacgtttgcactcatgatggtcggacttgggtcgatgattggctccggttggttattcggggcgtggcgggcggctcagattgcgggacctgccgcaattatttcctggattatcggtatgatcgtaattttgtttatcgcactttcttacagtgaactgggttcaatgttcccggaagccgggggaatggtaaaatatactcaatattctcatggatcatttattggatttatcgcaggatgggcaaactggattgcgattgtttccgttattccggtggaggcggttgcgtctgttcaatatatgagctcatggccgtgggactgggcaaagtggacaagcaatctcgttcacaacggcacacttacgggagaggggctcggcttcgcatccgtattgctgattatttactttttactgaattattggacagttaacttgttttcaaaagcgaattcattgattaccatctttaaaattattattccggggctgacaatcggagcgctgctgtttaccggttttcacggcggaaacttcacatccggttcaagcattgcgccgaacggctgggcgagcgtgctgacggcggtggccacatcaggtatcgtatttgcgtttaacgggtttcaaagcccgattaacatggccggagaagcaaaaaatcccggcaaatcgattccgattgcggttgtcggttcgctgctggtcgcaaccgtcatttacgtcctattgcaaatcgcatttatcggtgcggttgaaccttccatgatcgttcacggctggagtcacctgaactttaactctccatttgccgatttggcgatcgcattgaatatcaactggcttgtcattattctttatgcggatgcgttcgtatctccgtcgggaacgggtatcacatataccgctacgacgtcacgcatgatttacggcatggaaaaaaataaatatatgccgagcattttcggaaagcttcatccgctgtacggcgtgccgcgccaagcgatgattttcaacctgatcgtatcgtttatctttctgtttttattcagaggatggggcgtgcttgctgaaatcatttccgtagcgacgctgatttcttatatcacgggtcccgtgacggtaatgacgctgcggaggacggcggcggatttgtacaggcctctccgtctgaaaggactcagcgtggttgcaccgctcggcttcgtgttcgcgtctctcgtgctgtattgggcgcgctggccgttaacagggcaggtgctgtttatcattttgatcggccttccgatttatttctactaccaagcgaaagcgaagtggaaaggattccgcagaaactttaaaggcggcgtttggatggttgtctatctgctcagcatgatggtcatttcatggctcggaagtgaaaaattcggcggtctgaacatcattccgtacggatgggatatggggctgatcgcaatcgttgcccttgccttctatgcgtgggcgctgaagagcggattcaagactgagtatttgaaagacgccaaagcaatcaacgatcaattaaaaggcgggcaggcggaagccgctgccggaaaagaataatgattgataaaaaccttgcggtaacgttcccgcaaggttttttgatcaggcaaaaaaacatgggttcggcatcatctccgaacccatgctggctttatgatttatattcttttttaaccttttgaaatatatccgcatagttggtgaacacaccggttacgccccaattcagcagacggcgcatgtccgtctcgctgttcacggtgtaagggtgaagcagtaggccgtggctgcgaatgtttcggacattttgagcgttcagcgctttgtaatccggtccgattccgacggcatatgttttgatgtctgttaaatctgcgtcagtcattgaggtcatctgttccgcttcaagcaattggacggcgggaagtttcggatcgagctgtttgattttcagaaggctctccctgctgaaagactgaatgataacttgtccaagtttcgcatgcttacctgccaatttgtattttttcagtgaggcgatcagtttttcttccatacccggatatgtttcgggcgcctttgtttcaatataatagtttgcatgtctgccgaaccgttttaacacgtcatcaagtgtgggaacgcgaagtccggcgtattgcggttttgctttttccggataggccttattgaaccaagaaccggcgtcgagcttttgaatctctgctaatgtatgatccttcacccagccttgtccgtttgtggtgcggtccagtttttcatcatgcatgacgatcagcttgccgtcttttgtcatttgtaaatccagctcaatatagtcagccttcattttttgcgcagtttcataagaaaggatcgtgtgctccgggacataccccgaagcaccgcgatgggcaatggttaaaattctgtcaggagacaagaggtttccttttcccgccgccgatacaggcgtgacgatgaatgacaataaaccgaatgaaagcaataccaaagcaaacaacttatgtttccgcatgttttcttcccccttaaaaatcaatatctgtctctagtgtagaaaatcgttgtaaatgctgtactgcaaaaatattaatcttttatgttgttttcttacacatgctccgcccgcttgcctgtattccacgtcatagccaagaagacgatggacagcacgcatgaggagataagcatgataaagccgccgttccagtcaaagcggtctacgacataacccatgatggcgttggcgaaagcagagcctccgatgtagccgaaaaacccggttaagccggctgccgttcccgccgcttttttaggcgcaaggtcaatggcctgaagtccgatcagcatgacaggcccatagattaagaatccgatgctgatcagcgcgatattatcgatgagcggatgaccggcagggttaagccagtagaccaatacagcgataaatacgccggccatgaacagcacgccggccggtgcgcggcggcttttgaaaaatcggtcgctgatccagccgcacaaaatcgttcccggaattcccgcatattcataaaggaaataagaccatctggaatcttcaggagagaaccctttcgcttccgtcaaataagtcggcgcccagtcaacgacaccgtaccgcacgaaataaacaaagacattggcaaatgcgatataccacagaaatttattattcagcacgtatttgaaaagaatttctttggtcgtcatctctttttcctggtctttgaacgcatgtttcggatagtcattccggtattcttcaatcggcggaagcccgcaggattgcggcgtgtcccgaacgagaagaacaatcacaaatgaaatgacgatggcgataatcgccggaaagaaaaatacgcttttccaagtaacaaacatggcgatgccgagagtcacgagcggggcgagaatacctccgcctatgttatgggcgacattccatatcgacattttcgttccgcgttcactgatggaaaaccaatgagccatcgtccgtccgcaaggcggccagcccatcccttgaaaccatccgttaataaacataaaaataaacataatcgtcacgcttgacgtgacccatggcatggaaacaaataaaatgttgacgacacctgacaaaaacagacctgtcgcaaggaaatacctcgggttgcagcggtcagacaccatccccataataaatttgctgaagccgtaagcgattgatacggccgcaagcaccaagccaagttccccttttgaaaacccttgttcctgaaaataaggaatagcgaaggcaaagtttttgcgaagtaaataatacccggcatacccgatgaaaatccccaaaaatacctgcagcctgagccgtttataggccgcatccgtctttgaatcatccaatctctcaatatgcggagccggcttgaacaattgaaacatcatatcctcccctttgctgaacgtctatcatgatgtatgtatgactcctttccttgaaaatgacaaaaagaaccagaaatcacccttatgaaagggcgcggtttcctggttctcctcatctccatccaaaaatcattaacttgtatatgatagcgctttcttaaattatcacagtctggcgtgaatgtaaacgctttaaggaaagttttcatttttttgaataaataaccggagggaatatcagccggagcgcgaaagatttgatgtactcgattttgtactcaggcataagatgtgttaggccgaactaagaaaagcgaagggagtgcatctgttgattgatgaattggattttgcgttcggtgttctgccgctttgtatcatcatcctgtcagtcgccggaacgtacctgtttaaaaacgcgttcattatgccggctgccgctttagccgtttgccttatatgcacctttaccatattgaatttctcgtttatcgggtgggccgtcgtgtacacgctcgtctctttcgcgttatcgcatattacgatggtggtgatcagccaaaacaaaaaataggatcggcggcagccgatccagctatcaaaagcagagatgcgttctctgctttgttttatttatgaatgtgcaggaattccttgatgaccgcggtctgttcttctttcggatagcttctgtacagatggctggctaagcggacggggtcaccgaagaagtaccgctcatattgtgtctgtcttgttccaaaggggctcatggtcaaatcccatgcgaggcggaacacttttacccggtcctcagcgttcaattcggccgcctgtaaatattggtcaaggtctcctctgatgtcggaacggaacgctttttcagtcggcaaagtcaccattccgcttgccccgatcagctggatgatttccgtgaagcgcgggtagatgtcagggaaaatcgcgctgaccacgcgaagcggagtgacactcggacgcatataaccccattcgtctgtttccgcatcattctccgacttttccaaaagggctttcatcgtttccagaccggtgatgatctcagccatcttggcctgaatatgctgatattcccccacatctatcgcatcgacaagcgtttgggcgaggcccaggagaaactccgtctttacaatttgtctcgtgataacttgatgaaatgcgaaggcgttaaaagagcttttcatattaaaatcaaaagccgcctcgtaattattataaaaaaatacgcgttcccaagggaccaaaacgtgatcaaatacaacgatagaatccatttcttcatatcttgagctgagcggataatcaaacgatgattttccgagtacgaaagattccctgcagatgaattttactccttttgtattggaagggattgaaaaagcgaacgcttcatccgattcaaaatacatcttaggcagagaaaccacgagcacttcatccgtcaggccgccttgtgtggctaaaatccgcgcgccgtgtatgataaggcctttttcatttttatcgacgacttttgccgagataggtgtcggcgatacgtttacacccatttgtgaacgattcacctgaggggtgataaacgtgtgcgtaaaagaaagatcctgtgcggcagcgcgttcgtacagcgcttgaacatgttccggaaaacattgatcacggtctttcaaaagcgcggcagaggaggcgaagctcatcagcacggtattcatataatccgggcttcgtcccatcattccgtgcgtgtgtctggcccaatgttcgaacatgtttcttcttctttttacgtcttctttcgttttcggctgcaggtatgaaagcccggcccgttcttttttaccgggaagactgtaagtcatttgatctttcatgtccggtttcgtttgcaaatcataaagagagcgcttcgtttccagaaggcccttaaatgcgggatgttcagaaatctgtccctcgatcttttcaccatcaagccaaatctcatttcctagctgatttaatcggtcaatgaacattttgccattaatgatacccatcatgtcgcccttctttctttgcagatccactacctcattatattgaaaacgaaattgggtgttccggttatttccaaaggggaagagccttttttgataaggggggtgaagggattgcatcataaaaaaaccccttaagcagaggggtttttaactgatcatgtctttgtatcgttgttcgaggacaaagtctatcattccggtgatacgggtgttttcagatttttgtctgaaacggtcagacacttggattttccttgaaaacggaaatacagcaaaaatccaaacaaggccggccaggccaaaaaccatctgcagagccatttcaatcaaatcattaaaatgagtgctgaaaaaaaagatatataacgtgatgaatgtgactgtacatacgattttgacagtatgttggaaggtgaggagcggttcagtgaaacacattttcatttgattcagtgtgagcgaatcttgtttcattaaatatgtaagcagttctttgtcattttgacttcgcggaatcaaatcattttctattttttgaacggtgtccttgtatgtctgcatatcaatcttcatacgaatcctccttaaaaaataactccaagaatactcattgagcattcctggagcaaggagctgcctgttcaattatagaaatagtgataaaactgtgctgaacaaggctgcagctcctcctaattcaggtgctaaaacgactaaagcaccgatccctacaataacaataattcctgcgcctgcaatagccatggtattcacgacagaatcccaatccggagagtacacctcttcggaatccggcaatctgaagctcttttgttttattttaaatgtaatggtagttgttagtccagtagtagcactgtcaccgaccggaatatcaggtgtataaattttaaattgaatattcagcgatcccgcagccggattgacatacacttctaaataaccgttgcgcactgacaagctcagactgttaagcaggttttgatacgaatcaatttgtgatgctgtaaaagagacttgtgaatctcccatcagaccggtaatataagctcccggtttgccatttgtaatggtaactgtgttgggagaaccttcgcttggcactgttgccaaaagtgaagtagataaaagaatatccatttcaggtgatgcataaatggtttctgtcttgtcgaattcaaacatggcattcgcaagattcgatatattttctaaagcaggaatggttgttaaaatgtccgtcagtgtgcgcagtcttgcatcatacacgggatcagaaggcggatggacgctgcttgcacccgagtcttttccggagtatccgtctttgtcaatggcgacttttcccgctccgcttccgatcgtgccttcataaaattgatcaaaagcccagtttttcggcatcgggtatccgaggttgccgctgaatccggtcgacatgttagccgtaaagctatatttggtcagacctgcttctgacgtccggatacaaatgtttctcggcccgtataccccgatttcatatttcggcgcagttgagaacgcctgcattttcataaaagctgacttgatttcttggaagtaagggatgattttatccgtgacttcataatcatacgcatcaaaatcgacggcaaagtaaatggtcgttcctgacggaaaacctaatcttcgggcggctgatgcagcgctgtacgcatctctcgttccttggtcttttacaaaataagaagattcatagccgccgtcctgataaatcggaaacacgcttaagccggcattgaaaatcgcggaaagttcttttgacgttaacgctttcgatgtcagtccgctgctagtccgcacattcccggtcagatatcttcccacgatcttatagccattctcacgcaaagttttagccgtatctgccgtcaaaatggcagcggtgtcacaagctgaagcagcccgcgttgtgtcgcctgagcttgataataaagctttaatcgtcggcatgtccgcataacctgtctgcggcaggcacataaattcttggaaagctttcactgccgatacaactccgacgccgtattttccgtcgaattcaccggggtcaaatgatttcccattacagtaaagcgcgtattgaacaatcaaaacaaagcctgtccgtgaatcgccgggagtcaaggtaggacataagctggtcgttccgttcccgaaaaatccattggcgacgcttgtgctcatgccttcttctttttgcagagcatagatgagggccttgtttgtatcgcgggcatataagccgtcacaaggcatcaagccgatgtagtcattgtaatcccggttcaggttctgctggatttggcggattcttttgtcgcctcccgctactaaccgaaaagcgctcatatccagcaaagccttcataatgagtgccgtgacaatgccgtcttgcttagtaagtccggccgctttttgaaactcttttacagcgctttcggtattttcatagaaaacgccagaaaatccgcccgggttaaaccctttacaccacagcgccccctgcagaatgtaattcatgtttgtcggcttagaatcgggagcctgctttttcaacggtttaaacaatctttgtgtcgtcggtccgaagttatcggctggttctgaaataccaagctcaatttgaagcgcccgtgtcagaccgtaaatggtatcccagcctgtttttccgttttccggcaccttgttgtacccgtgtctgcctttgtacgtctcattcagccattgttgtgtttccaggaccatttcgtccattgcaatccctccattacgtgtagtgtgcgttcattcataggtggcaaacgtatgacagtttgtcatgggtgcaggagtttgtccgaggacagccccatcatacaaacgccgatagagaggcattgataggaaaagatctctctatgacaattgatacaaaaacagcaaaatggatagcgctttaaagtaactttatcacttaatcaaaaataacaagaatcataagtagtagtcatatagtcattttcagggctgttttcatctctccctgcagtcaaaatggttagttggacggatttatgattagctatattgtcattaacataaatagggtaaatagttacaggaaggaaggattttctcgatgaaaagcaaaaagatttttaagtcgctcatcattatttttactcttttaatcagcggaattggttttatgggtttttcttctccgcaaaaagcagaggctaaagactggcttcatacttataaaagcgggtatttcactaactatgtgatcaatacatatcatcctaaattcactaagacgacaaaaaagtacagcttgagagccgtgacttttaaatccaacagtaaagggaagggcacgtataaaatatacgttcaaaagcaagtcaacggcaaaggtgcctggaaaacaatcaaaaccgccaatgcaaagaaaaatggaacgacttattttgaaacacctttgttaaaaaaaggagattcatacagatttaaaatggtcaatcaaggttcgaaaaaacgtgtcaattatagtgcgagttggattgtattcgcttcataattttgattttcagcttataatgttttagctgccgcagctgcggcagctttttattttctccggagctcaaccgccagggagaccgcatctgtctcttcgggcgtacgtttgtattcaccgcatcattctggattatgcggaaaggtacatcgtttcaatgaaaagccgatcccgggtccttttgatttgtttgaaaatgttctgatataaaaaaggcgtgccgcggtgtaaaatggctatattgataaaaatggaggttgagatggatcaagattatatgactgagcttgtctcagtccagctgaagaaaatccggtcggagagaggctacacacaggagaaaatggcggatgtgatcggcctttctaaaaagtcgctggtgcagattgagaaagggcgggcgcttgcggaatggccgcacgttgtggcggtttgcgcgcttttcagatcaagtgaaacactgcaatccgtattaggagatgatccgctggaggtcattgaaacggttgctcaccgcacaattgacaggccgaaggggaagacgatgggcggcaaggtgtggtggaaagccatcgagaaaaaaggcgagttccgcttgcagcagcatttgatttcccatcattaccgcatccttgattcttatgatgatctgtggttcagcagttttgaaaaggcagaagctttggagcggcttgatgagctgtttttggaggcggaggaagcgaagcgctgacgcacctccggttgatgtattttctgacaagtgagaaaatatgtataaattccagccaaaggagagattcgaatgaagcctgaagatatcgtccgaagcggcccgaatcagtacatatgcaaggaaggaatcgcaaaagaacttccggggctgctggagacattcagaaaacccgttattgtgaccggaatcaaatcctatcaggcgttctccgattacggcggcggttcttcctgggatgtgattcagcacaaaggatactgttcacctgaggcggtgcgtaaggtctgcgggcaggcggaagacgcggatgtgatcatcggtatcggaggcggcacgattttggatttggcaaaagcggcggcagaccggcttgatattgaggctgtgatgcttccttccattgcggggacgtgtgcggcaagtacgccgttgagtgtcatatatgatgagagcggcaattttatcagagttgattatcacaagcgttcaagctatttgacgcttgttgatccgctgtttttgctttcctctcccattgaatatatgaaaagcgggatcggtgatacgctggcgaaatggtatgaggccgaggcggtcatcagaaatacggaggaagcgccgcctctgatggcgcaggcggggctgagacaggcggaatatatgcgtaatctgttattgcgttacagtgaagccgccgtcgtaagcatggagaaaggcgagctgtccgtgccgttcatccatacggcggaaacgatcattatgcttgcgagaacggtcggcgggtatggcggccgtttgtgcaggatggcaggggcgcatgcggtccacaacggcctcagttttcttcaggagacacatcaggtgctgcacggccagaaggttgcttacggcatattggtgcagctcgcgcttgagaatcggagacatgagattgaagagctgcttccgttttaccgccggctcggtttccccgtcagtctctgtgctctcggcatccttgacaaccatgaggaagcaaagcgccgcatcgcttctcacgcctgccgggcggaagaatcgttatgcttaatggggcaatattgcgggaaggacgtgtcagcggcgattgaatcgctcgaatcagcacaaaagacaggatagagcttgtaatctgtcttgtctttattttttgaatatttccgttataatgagtggggtatagaaagggaggggccaaaggacatgtatcaggcgaagaagatgttgttattaggatcaggcgagctggggaaagaagtcgtcattgaagcgcagcggctcggggttgtcactgtagccgttgacagctatgagcatgctcccgccatgcaggccgcacacaaaagctatgtgattgatatgcttgataaagcgcaggtcagagaagtcattgagaaagaaaaaccggacttaatcgtgccggaagtggaagccattgcgacggatgagctgctgaagctcgaggaagaagggtttcacgtcattccgaatgcgcgtgcggcaaagctgacgatggaccgtgaaggcatcagacggcttgcagcagagacgcttcatcttccgactgccggctatgaattcgcgaatacatacgaagaatttaaagaagcggcggaaacaatcggctttccgtgcgtggtaaagccgctgatgagctcttccggaaaagggcaaagcgtgtgccgctcggcttccgggctgaaaagctgctgggacatggcaatggaaggcggccgggtgaaaaacggccgggtcatcgttgaggaattcattccgtttgaatcagaaatcactcttctgacagtgcgcgcggcgaacggtacgtccttttgcgcgccgatcggacatgaacaaaaagacggtgactatattgaatcatggcagcctcatcatatgacggaacagcagattgaagaggcgaaacacattgcgaaaagcataacggatgagctcggcggatacggtttgttcggggtggagcttttccttactgaagataaagtatatttcagcgaggtgtctccccgtccgcatgatacggggctcgtaacgcttgtgacgcaaaatttgtcagagtttgcgctgcatgtccgcgcggtcttgggattcccgattccggaaatcattcagctgtcgccgggggcaagccgtccgctgaaggcgcccaaagagcttgctgattatgcggttgaaggtttggagaaagctttggcggtaaaaagcactcaggtccgcgtattcggtaaacccgtcacgaaagtcggacgccgtatggcggttgcgctttctgcagccgagaccgttgaagaggccagagaaagagcggccgaagcactcagtcatttatcaattacataaaatgatcttaaaaggcgtttttaccgtaatggtaaggcgccttttttgtttggacagactatatactggaaaacggggttgtgagataatgtatgaggccgttttgtgccggttttttaattcttgaaactttttatgtccgcaatcgttatatgtaatgttctcatttcacggagaaggaaataacaatacatcatacggcttttcattcatcaagaacggacaatccggatcgcagcatggaatatttaagcagggtaatccggaatagaggaaaccatgattgcttaccttaatatgaacggcgaaaaaacaaaaatcaccagattagattgttcaaataacaccaaatgctgtataataaaagaatttgaatgatagcattgaaaggatttcattttatgtttccgtaaaatggagtctttatgcatacgcagtccgatttgatatggttttaattggaggtttgtgtaaactgtgaattatatacctagtatgattacaattggaaattttatttgcgggctcttatcgattcattcccttttgtatcataatatacactctgcggtgatctttattttcaccgggatgtttcttgatttctttgacggtttggccgcccgtaagctgaacgcggtatcggagatgggaagggagcttgactcttttgctgatctcgtgacgttcggcgtagcgccgtccatgctcgcttacagtgtttcactatatacgcttccgttcatcggaattttaatcgcgctttcctacagcatctgcgggatgatccgtctttccagatttaatattgaacaaagcaagctgccgacgtttatcgggatgccgattccgtttgcgggtatgtgtcttgtcattttgagctttatcaataacgcttttcttctgggggcgggaacgatcgcgctcggttatttaatggtcagcaacattaaatttccgcactttaaaaaacaggcgcctgaaaacctggagagcagaagatggaattagttcagcaattaatatccgattacggatatatcgcgatttttcttatgctgacactcggtattatcggattgcctattccggatgaagtcatgatgacgcttgtgggctacttcgctcatttaaacgtgctgaattacgggctctccattctgatcagctttatcggagcgctccttgggatgattatcagctacttcatcggcagaaaagccggccggccgtttattaataagttcgggaaatgggtcggcctgaaggaaaagaggatggagaaagtagacaggtggatgaagaagtacgggccgtacaccattattttaggttatttcatccccggcatcagacacgtgacctgctacttttccggaatcggcagaatggaattcaaaacctacttatgcttcgccgccatcggagcgtttttatggtgttttatttttattactataggaaaattcataggagtaatcaatgtttaatactgccgctaaagttctttaccgttcattgattgaactgactaataatcgattgacgtcttatctcattaaaaacttctgtgaatcgaaactgagcaagccgatgattccgctgttttccaaacactatcgcattaactggaatgaaacggaacgcacggcttctgactttgattcactggcgtcatttttcattcgtgatattaatttgaatctccgccccgtggcaaaagagaagaacgccatcgtcagcccggtggacggcgtcgttcagacggtgggcatgattaatcccaatcaaactttcatggtaaaagggaaggattattcgttcgccgaactgacggggtttaaaagcgccgatcacaagtataacggcgggtgttttgccgtgctttacctgagcccgagacattaccaccgcttccattctcccgtcagctgcacgtataaaaagctggccgagctggggaaacgctcctatcccgttaatacgatggggttaaagtacgggaaagatgtgctctcaaaaaattaccgttatgtgtacgagctgacccgtgctgatcagcagatgctcatgattccggtaggtgcgatgaatattaactcgatcgttcagacaaacaccggaaaccggcttgagacgggggaagagcttggctatttttcatttggatcgaccgttattttagtattcgagaaagatatgtttaccccttcggataacctgactgaaggccgtgaattacaggtcggtcagatcatcggttatgcggagtcacaggaggaggcgtccgctttataaaagctgctcctcttttttatatggtgtaaggaagtgaactttatggaagaaaaggatttgggaaagctgatcgaacagtatcggcatacaggcgatcagcaaattcttgaagcggtgcgggatgcatgccggcctgtcgttgaggcgctcatctcagaactggctgaagacagcgcggatcttctgcgggcaaaaggccgtgaccgttttccgtttattatcggcaagtatcagaccgcggccggcctttcgcttgagacctttttgcgcaatacgtatcggttttattttcagcaggttttaaaaggcgaagcgtgactggaagaaagagtacggacggaaatgttcatctttcgcccgttttcctgtatgatatagtatagtgtgcgtgatcattaatataattgaacagggtgtataaatcatggaaaaacaatatagagttttactttattataaatatgtaaagattgatgagcctgaagagttcacggctcagcatttgaagttttgtaaggagctcggtctgttaggccgtattttgatttctgaggaaggcattaacggcacggtgtccggaacggttgaacagacggaacaatacatgaatgcgctgaaagctgatccgcgttttgccgacatgccgattaaaattgacgaggctgacggccatgcattccgcaaaatgtttgtgcgccataaaaaagagctggtgacgcttcgtctcgaagatgatgttgatccgaatgtcacgacgggcaagcatttgaaaccgaaagacttttatgagcaaatgcaggatcctgacacgatcgtgatcgacgccagaaacgactatgagtatgacctcggtcatttccgcggagcggtcagacctgatattgaggcgttccgtgagctgccggactggattgaagaacacaaagacatgcttgaaggcaaaaaaatcctcacgtactgcacaggcggcgtacgctgtgagaaattttccggctggctgctgaagcagggatttgaagacgtgtcccagcttgacggcggtatcgtcacttacggtaaagatcctgaagtgcaagggcagctgtgggacggacagtgctatgtgtttgacgaaagaatcagcgtaccggtcaaccgcgtagagcacgttatcatcggaaaagattatttcacgggcgagccgtgcgagcgttatgtgaactgcgcaaatccggcatgtaataaaaaaatgatctgcacacctgagaatgaatacaaatacatgcgcagctgcagtcacgaatgccgtacgaacgaacgaaacatgtatgtgaaagagcacgaaatgactcaggaagaaatcaatgaacgccttgctttgattgaaaaagaggatcatgcggcgattgattaatagaaaagaccaccaatgaggtggtcttttttgtgtttacatactttctgtccgggcggtctgatctgccgtgacgggtcctttatatgtgaaggctttttcccatttggatacgacgatgcaggcgaccgcatggccgggcacgttgacaccggttcgcgccatgtccatgacgcggtcgacaccggcaatgatggcgacgccttccgcggggagaccgacggcattcgctgtcgccagaagcacgacgagtgagcctgacgggacggcggcaatgcctttgcttgtcatgacgagcacaagcatcatcagaagctgctgagaaagcggcatctccacatgaaacgcctgcgccaggaaaatacaggacaccgataaatagaggcttgaaccgtcacagttaagcgataaacctgacggaaccacaaaggagacgacccgcttcggacagccgtatttctccatccgatccatcagctgaggcagaatggtttctgtgcttgtcgtggagaaagcgatcaaaaacagatcccaaatcattttcagcacttcaaagtacttgattttaaagataagccccacgatcggaaacagaacgaagaggatcaggaacagcccgagaaacacagtgccgatcagcttcagcatcgggagcagaagcgcgattccgaattgcccgacggaggcggccatcagggcgagaacgccgatcggagcggtgaccatcaccatctgcgtcagcttgaacataatatttgccgtggattcgaagaaactcatgacaggtgcggaggctttgccgatgccggctgcggcaacaccgaataaaatcgcgaaaaaaatgacggcgagaagatcatttttcgccataacgtcaatgatgttaacggggataatatcaagaagcatttgtttcagatcgactactttttccgtatagccggaaagctcgtgaatgtcttttttagcaagatgagagaggttaagtccgactcccggcttcagcacgttcgccaataacagaccgagcgccagaacgagcgtcgtaatcacttcaaaccaaataatcgttttgatgccgagactgcccatttttttcatactgccgctgccggcggctccgataacaatggtcgaaaacacgatcggcacgacaatcattttaatcaggcggataaatccgtctcctacaggccgcagcgccatcccgaaatccgggaagaaatggccgatcaatgctccgatggctaaagcgatcaaaatctggaatgcgataaattttttcaagcgaatcccccttttacttgcgcatttcttacgtaattcgtgaagcaggcggcaaccaccttcctgtccgccataaatttgtcacatgattgactgtgcgaaaggaaggattgctttacattatgtaagcgcaatcattgaatatgacagaaagtcctcattgaaaaaaatgaaggagcataagaataaagaaagatttccgctgaaaatattaaaaattttgataattatcctcttataagtggtatatttgatatgatatggtcaactgcattctcatatatctgtgcatacaagattcgggacagaaaaaacatgcagcccagaaaagactgaaaatttgaacaattagaagaaaggtgtgcttttgttgaatcaactgattgaaagacgtaaggtcacagctagaaaggaaaaaccggattccgcttcattgggatttggcaagtacttcacagattacatgtttgtcatggattacgaagaggggagagggtggcatgatccgagaatcacaccttatgaaccggtccatctggatccttccgcatcggttttccattacgggcaggccgtatttgaagggctgaaggcttacaggtcagaagacggacgggtgttgatgttccgtcctgaccaaaatataaaacggctgaataaatcgttacggcggatgagcatgccacctcttgacgagaagctggcgctggaagcattgatacaattggtggagctggagcaggaatggataccgatagaaaaaggaacctctttatatatccgtccgtttgtgattgcgactgagccttctttaggcgtccggccttcaaagcgttacaagttcatggttgttttgacgccggtcggttcgtattacggcgatcagctgaaaccgatccgtatttatgtggaggatgagtatgtgcgcgccgtcaccggcggagtgggcgacgtcaaaacgtccggaaattatgcggccagcttacaggctcagcggaaagccgaagaactggggtatgatcaggtgctttggctcgacggagtggaaaagaaatatgccgaagaggtaggcagtatgaatatctttttcatcataaacggagaggccgtaacgccggcgttaaacggaagcattctcgggggcatcacacgcgcatctgtgatagagctgttaaaaagctggggcatccgtgtcagggaagaacaggtcgccattgatgacatctatgaggctgcaatgagaggcgaggtgtcggaggtattcggtacgggaaccgcggccgtcatctcgccggtcggcgcgctgcacattcacggagaaacgattgagctgaataacggtttgatcggtgaagtgtcagaaaagctctatgaaacgattgccggcatccaagtcgggaaggtgcgggattcgttcagatgggtcgttgaagtataaatgaaaaaagaacccttgcgccgcagggttctttttttggttattgggattttacggcttgcacgcgggctctgcttttccggtttttcaagtaataagcggtgtagcaaacggccataaatacaattccgcaataaagggcgatggcctggttcggatcaaaagcgatgccgatacaggaggcgaggcataggagaaaggccgctatcggtacggccggatatcccggcgtcctgtatttcaagtctgaaagctggtgcccttctttaagaaatcgtcttctgaacaaaaattgtgatgcggcgatgctcatccacacagccactaccgcaaatcctgagacggagacgagaacaagatagactgtatccgctgcaaatacgcttgacaacaacgacagaatgccgccgatcatactgaagatcagagcgttaaaaggaatgcctttagaggtcagcctggcaaaggcgggatgaagctccccttctttagacagggaccacagcatacgtgatgacgcgtacagccctgaattggccgcggacagaagcgccgttaaaatgacgaaattcatcagatcggccgcataaggcacgccgactctgtcaaataccgtgacaaacgggctttcaatcacaccggcttccttgatggagatcatccctgacagcacaaaaatcgttccgataaagaaaagcgccagccgccagactgtggtcttaatggcgcgcggaacggttttttccggatcggcgctttccccggcggcgattccgatcaattccgtccctgaaaaagcgaagtttactgaaagcatcgtcatcagtatcgggaaaaagccatttggaaaaaggctgccgccatccgtaaagttcgacagcataggtgcggcctcaccgcttttcatcgggacgaggccgaacatcgccgctccgcccaataaaataaacagtaagatggctaagactttaatgcttgagaaccaaaactccgattcagcaaaaaatttcacggagaaggcgtttaataaaaagatgaaaagagcgaataccgcactccacatccaaactgaagtatgcgggaaccagcgctgcatgaagagcccggccgccgtgaattcagagcccagcgccaccgcccacgtcagccagtacagccatgcgaccgtaaagcccgtcgcgggcccgatataggtcttcgcataggtgtggaatgcgcccgtcaccggcatggccactgacagttcaccgaggcaaagcatgacaagatagacgatgcccgcgcccaaaaggtaagcgaaaatggtgcccgccggacccgcctgatgaatggtatacccagagcttaaaaacagccccgttccgatcacacctccgagtgatagcataaagaggtgtctgcttttcatacttctctgaaaattcgtctcgttcttgttgttcattgttttccaactttctgcgagggccgttctaataaaaaatctcatgccggcgaacggcacgagattccggcgaaccggctttttgaatagaatatacaaactattccgattagtcaagttgtttttaaggtcttggcccaatcggcaatggcttggatgtccgcgggtttcgtccggcagcagcctccgatcaggctcacgccgttttcgtaccagctttgcgcgctttttccgaaatggttttcgcacgctgcgcctttccaggtttttgtcaccgggtcatattgttcgccggagttcggataggcgataatcggtttggatgctgcccgtttgatttcttctatcagcggcggaatatattcgatcggtgtgcagttgatgccgatcgctgcgatttggctgcaggagtcaagcagggccgcgcattcggaaataggcgtgccttcgctgatatgccgcccgtctttggcgctgaagctgatccatgcataagtgccggggaattcctccagcagccttgtgatcgcttttgcttctgacagggacggaatggtctcacaggccaaaagatcggcgccggattctatgagggctttcatccgggggcggtgaaagctgatcagctcatcttccgtcagtccgtaatgcccgcgatattcagagccgtcagcgaggctcgcgccgtaaggtccgatagaagcggcgaccaaaggtttaggccggtgtaaacggttttcttcatgcgcccaaaattcatcgcgtgcttgtgcggcaagttcaacagatgtctgaatgagacgtatcgcatcggtttccgggatgccgcgcgctgcaaatccttcaattgtcgattgataactggcggtgatcgcgcaatcagcgccggcggcaaaatattctgcatgcacctgtttgatcagttcgggtctctccaaaagaattttggccgaccacagatcgtcatgtaaatcacagcccatccgctcaagctcggttgccatcgcgccgtctatgatcataaccgggtattcatttaatatttgtgtaatgggattcataggccttcctttctgactttactgaaaatatataaaaagggtaatggacgctattctctttgtcaatgaaccggcggaaaaaaggtgttcaggacgctgcctgaacaccttttgtttaggaaatatgtttgcctttcgcgcttttcgcgatatctgaatactcccagcattcgatcccgtcgtcatcagggagcacatctctgtaaaagacggggtcctttccggctttcttttgccgggcataatcgctcaaagcggcaaatgcttttttcgacagaaggaaaattgcgattaagttcacgaccaccattaagcccatgaacaagtcagccatatcccacacaagctggactttggaaatacagccgaacagtaccattccgagcacgcagatgcggtaaatgaacagccactttttgttctggcttaaaaatccgatattggtttctccgtaataatagttgcccatcagagcgctgaagccgaacaaaagcattaagacggcaaggaaacctgacgcccacgcgccgacatggtcgctcaaggcggcctgagaaagcgcgatgccgctcagtcccggctggtgataagcgtctgaaaataaaatgataagcgccgtgcttgtacaaatgacgagcgtatccgtcaggacgccgaatgcctgaatgagcccctgtttcaccgggtggctcgtcgtagctgtcgccgccgcgttcggagcgcttcccatacccgcttcatttgagaaaatcccgcgtcttacaccttgcatcaaggccgcacctaaagcgccgcccgctgcctgatcaatgccgaacgcattttttacgattagcgacagaacgccgggcaattgggtgatattcgtcagaatgacaaagaaagcgacaccgatatataaaacggccaagacgactacgatgtattccgccattttcgcaattcgtttgacgccgccgaagattacgccgccaaaaaccaagattaaaataatgcccaatgtaagccggctggtgccgaacgcgttttgaaaggcgacgctgatcgtattggattgaacggaattaaaaacaaccccgaatgacagtgtgattaatacggcgaacagcgcgcccatccagcgtttcttcaggcctttttccatgtaataggccgggccgccgcggaatccgttttgatcttttactttataaatttgggccagcgtgctttcaacaaagcttgaagccgaaccgatgactgcgataatccacatccagaaaatagcgcccggaccgccgagtgcgatcgcaatggcgattccggtaatattccctgttccgacacgcgccgccatactgatgcaaaatgcctgaaacggggaaatgctgttttttgtccgggcggccgcgccttccttcaaaacccggatcatttccttcagcatgcggacttgcagaccctttgatctgaacgtaaaaaacagtcccagagaaagaagcagtacgattaacagttttgaccataaaaaatcatttgccgagccgattacattttcaaggaattcctgcatccaatcacctcttggttcgtttgattaaaaaatactgagctcccactcctgtgcgatatgtttcagcagcatgccgccggtcaggctgttgccgtattcatcaatggccggaccgtaaatgccgatgccgcatccgttatgaaaaggctgctctcttctggcgcttgggggaaccaatgccatgatgccgccggataccccgcttttggccgggacgccgacgaaagccgcatatttgcctgacgcattgtacatcccgcacgtcagcatcagggctttggcgagtttcgcgacatctttcggaatgacctgttcccgtcggatcggatggtagccgtcatgggcaagtatcaatccgattaaagcgatgtcctcggttgtaccctccatggcgcactgctttaaatacacttcaagcgtttcttccacatccgcctcgagaaagttcgtttcttttaaatagtaggcgagcgctctgttccgatgcgcggtctgccattcagaacggaagacctcctcgtgaatgtgaggccgttttcctattaatttttcaaaaacggaaaagagatattctaatttattatgcgccgtttcacccggaagcagcgaggcgacggtaatggcgccggcattgatcatcggattgaagggcttcccgggtttatggatttcaagccggatgatagaattaaacgcatcacccgtcggctccacgtccacacgatcgagcacataaggaatgcctctggacatgcatgcggcaataaagctgatgacttttgagatgctctgcaatgtgaacggcacattccattcaccggcatgaatcattgagccatccggctctaatatgcaaatgcccagctgagagtcgttgatttctccgagggcgggtatataatttgcgctttttccattgacggaaaacggtcggtaatgctcgacccaatcttgtaaaagtgaagccagttcctctttttcaaggcgctctctgaccatatctttcataacattcctcctctattgcaagcctgtccgaagcggaaaccggtcttggaaaacgttttcaaaaatagcgtgttccatgttaatgtataatgacatctacagaatcatacaaaatacgacaaaatcattcttaaaataagccgatagatttataaatcagccggagtgtcccgccattcgggtctaaagaaatttgcggactgtatcggtcttgttcaaaatagacagaagaaggaagtgattatgatcaggctcgactatttactgaaaaaagacggctatcttttcgctcttatgctgatcaccgtgccgctggcgggggaactgaaattttaccccctgaatgaggtatatcggatcagcttcggcgccccggcttttttcttttttcttctgctgcttcggcatgtgccggcggtattgtcagggctgttgacaggtgcagccgttgtgggattccggatcggcctggcgtgctgggggggagagcatgccggatttacggcggcttttttcagccaatatcccagtttctttttttactttacatatgcctgtttgttttatgtgctgaaggtcaggcttttttgggatcggccgctcatgatcgggtttctcggttttctcattgaaatggcgtccgatgccgttgaaatgacggttcagttttccggcggcaagcagattatgatgccggacaagctggcggatattgcggttatcgctgtttctcacacatttattgtgctgagttttttcaacgtgatgaagctgcacgaatctcaggtcagggaaaaacaaacgagaaagcagcatgagcacatgctgatgattgtgtctaacttatatgaagaaacgattcatctgaaaaaaacgctgaaaacgacggagcatgtgacgaaagaatcctatcagctgtatcgggaaatgagcgggaacgaccgggagctcgggagccgaatgctgcgccttgcgggagaaattcatgaagtgaaaaaagacaatcagcgaatattcgccggcctgtcgaagctgatttcaaatgagagattccgggattacatgaatgccgccgatctggtcggcctcgttatccgcatcaatgaaaaatacgccgaatctttaggcaaagacattcaattcaaaaacgtgattgaaggagaacaccccgattatcacgtctttaccgtcctgtcgatcttaaataacctgaccgccaatgccgtcgaagccatgggtgacaggggtgagatccgcctcgcgctgcgcagggcggagggggggatggccgaatttgaggcggaagatgacggtcccggcattccggaaaaaatcggagaggtcgtttatgatcccggttttacgtccaaatacgatgaattcggcgcaccttcaacgggcatcgggctttcatacgtgaaggaaatcgtaaccgaacttgacggagacatttcctttcataacaagccaaaaggcgtcatatttacgattaagctgccggtgaagcatttgattgcagaaaggatgaactcataatatgcgtttttttatagctgatgatgaccgggcgatccgttccattttaaaacagatgatcgaggacgaggacttaggagaagtcgtcggtgaggcagaggacggaagccagattgaagggcattatctccatttcaaacaagtcgatattttattaattgatctgctgatgccgggccgggacgggattgagacgatacggcatcttcagggggcgtacaacggaaaagcagtgatgatatcgcaggtggaggcaaaggaaatggtgggagaagcttattctctcggcatcgaatactttatccataaaccgatcaacaaaatcgagatcgtcaccgttttgcgaaaagtaaaagagcggattgaactggaaacctcgatcggcgacatccaacactcgttaagccgtcttattcagcggaatgagccgaaaaaaagcgggccggggggatgcacgagaaatcaatcaaagaaacaggaaaatttcttttgtcggaattaggcatcgtgggagaaagcggggcgcatgacctcatggccgtccttcactatttatttgaggatgaacaggcggaaagaaacatcccgtctttaaagcagatgtttacaaacgccgccatccggaagctgggacctgcggcggcacaagccgaggttaacagagaaatcaaagcctcggaacagcggatcagaagggccgtcattcattcgttaaaccatttcgcttcattgggcacaactgatttttcaaaccccaaatttgaatattacgcctcgaaattctttgatttccccgctgtcagcaagagaatgaaagaaatgcaggccaaggaaaccgtgccgctttctccggttaaagtgaatatgaaaaaattcattcacgtcttttttttggaggcgaaagatttacgcgaaggatcaaaatttgtcagcggaggcagccggtaagctgataaatagggtttacgtatataaggtttttgtgtaaaataatgttaactaagaaggaacggagggatcctgatggctgatcaaattccggttttcgcactaatgaaatagtgtcaaagtctctgccttgagcgcggaggaaaccgggattgtctgcctgaataaggaacctgacagtaatagtgagggggcggcgattatgccgccctctttttggcgtcttcacacatctctttcttctccgcctaaaggcgaagctctgtgtcagtcaataagggaaatggggaaacaagatgacaaaaaaacaaagggaaatagaatccgttttgaacatcgcaaaggaaaatggcttacggttaaaatatgaaggggcggacataaatgaaacgggtatggacttccaagtcgtatttgctgaagatgacagcggcgtgacatgggtgctccgaaagccgcgccgtcccgatgttatcgaaagagcggctgcagaaagcgatgttctcgcgtttctccgcagccatgccgctgtatcagtccccgattggcggattcatacaccggaactgatcgcttatccgaaactggacggaataccggctgccgcaattgatctggataagaaacagtatgtctggaatatggaacacgagccgccttcagacggttttgtcggctcgcttgccgcagcattagccgggctgcacggggcagacacggatgcggcctccagatccggaattgaaatcataaaaccggatgacgtcaggcaaagggcggcggaatcaatggatcatataaaaaaagaaatcggggtttcagaacagctttggaaaagatggcaaacgtggataaatgacagctcgtactggcctgatttttctgcgctgatccatggcgacttgcatcctccgcatattttgatcggcgaaaatcagcgtgtgacgggtctcctcgattggacggaggcaaaggttgccgatccggccaaggattttgtcctttatcaagtgatattaggagaaaaagaaacaaaacggctgatgaagagctacgaagctgagggcgggcgcgtctggccgaaaatgcaggagcatgtgtcagaatggcaggccgcttaccctgtggaaacggcgaagttcgcgcttcagacggggcaagaggagcatatgcaaatggcgcgggacatgctcggactgtccgatccgaaaggttattgacttccgccggatgacagcgtatgatacattttaaaatcatagaacggatgaacaatgctgaggaagagtaagtacgcatcagcgcgcggggttcagagagtcggtggccgctgtgaaccgatccccgtccggtgccgaatgggcttctgaattgctgcgctgaaataacagtaggcggtgccgggattctttccccgttatcaagataggagtattgaaaccctgagtttctgtactttttgagagaatggctcttcagccgttaataaaggtggcaccgcgaaaacctcgtcctttgatggacggggtttttttgcgttgttaaggaggtgatggccatggaaagtgactggagacggacagacaatcaaaaaaggagggatattcatggtgatcgcaaccgacgatcttgagctcacatgtccgcattgtgaaggaaccggcgaggagaaagaagggacgccctgtccgaagtgcagcgcgaagggcgtcatattgaccgctcaaggaaacacgctgctgcattttatcagaaagcatatggatcagtgaaatcaaacgaatatgtaaagaaacagcacaaaacaaaaaagcttgtagaaaaaacatcgttttctctacaagctgctttttcattcttcaaaataaggattcacatggatgagcacttcttcaacatctgaaaagtgtcttttgatttcatttcggatttcccgggctatatcgtgtccctgcttaatcgtcaaatcatgatccaaagataaccggacatcaagcaatttatagtggccgtgttctcttgctcggattttatcgagccgtttgacttgagggcaatccaaaataaccgctttatattcctctatcagttcgggatcaacacttttttccatgagaacgtcaacagacggcctgattaattccattgaaatcttaaaaatgaggtacgccacgatgacactggcaattgcatcggcgtacaacagataggaccatccgcgtgtgttcccgataatcgccaataggacgccgataaaagcggcaagagaggcaacgatatcgcctttatgatcgtatgcaatcgctataatcgctttactgttccatttttccccttgtttgatcgaataacgatataagatctgcttagccacgtaggatatcagagccgcaaacaatgcgctgtattgcgggatgcttggaccttcaacaaaggacgaaatcgcttctatcagaatatacacggaaacgagcactaatatgattcctacaatcgcttcgctgatgatctcagctttgccatgcccgaaaggatggtcttgatcgggcggcttattagaaatgccgatgacggccaggacagcaattgaagccacgacatccgctgcagaatgtataccgtcggcaaaaactgcttcactatcgcctatcagtccaaaaaagatctttcctgccattaagatcagattggctatcaatgcaatcaaagcaacttttttgcttatttgttctctttcacttgtcattttttcctcctataaaactgcacaaaaaaataggagcgctcttgattcgctctccgtatcctttcttgtgtaatcactttgcttatcatatcaattcagtttcgagtgggtctatagcaaggttgtttcctgtttactaataaataaggtgacagaaaaaaagttggagcagggctaaatagtacataaacaaaattgcgctgaatttaaaaatgaactgttgacatttgagtatttatcttttattattatcctgaattcaagatattttaattcgagacaatttaattagagtgcaggataagaacctgccgatcgttttgttttttgatcatacattatttgattttttataccataatatctcgaattcgagataaaggggagtgcgagagaaatggctgaatttgtacagctggtgaatgaaagaagatctgcaagcaactttcttccagaacatccaatcacaagagatgagctcaacgaaatgtttgaattggttgcgttggctccatcagcttttaatttgcagcatacaaaatatgtgacggttcttgacccggaggtaaaagaaaagctgaagcaggccgcaaacggacaatataaagtgttcagctcatcagcggttcttttggttttaggggataagcaggcatatcagcaagcggctgacatctatgaaggattgaaggtgctgggggtattaaataaacaagagtatgatcacatggttcaaaacaccgtttcgttttatgaaaacaggggagaactgtttaagagagatgaggcgataagaaatgcttcactttctgcgatgatgtttatgctgagtgctaaggaaaaaggctgggacacctgtccgatgatagggtttgatcctgaagccgtgaaacagattttgaatatagatgatcaatttgaggtcgtcatgatgattacaatcgggaaagaaaaaatagaaagcagaaggccgcgcggctaccgaaagcctgtgaatgagtttgtggagtatatttaaatatttataaaggagcgcataaaaatggctaaaaaaacgatgggaatccatcatattacagcaattgtcggccaccctcaagagaatgctgatttctacgctggagtgctggggctgcgattggtcaagcaaacggtcaattttgatgatccgggtacgtatcacctttatttcggggatgaaggcgggaagccgggaacaatcatcacattctttccgtgggcggacgcccgtcaaggcatcattggagacggacaggttggcgtgacatcttacgtcgtgccgagaggtgctatggcgttttgggaaaagagacttgaaaagttcaacgtgccatacacaaaaatcgagcgttttggggaacaatatatagaatttgatgacccgcatggcctgcatttagaaatcgtggaaagagaagcaggggaggccaatacgtggactttcggagatgtaaccccggatgttgccattaaaggctttggcggtgcaaccctgttatcagcacagcctgaaaaaacaggtgaactgctggaaaacatcatggggcttgagcgagtcggcaaggaaggagacttcgttcgttatcgttctgccggtgatatcgggaatgtgattgatcttaaattaacgccgatcggccgcggacaaatgggtgtcggcacagtgcatcacatcgcttggcgggctcaggatgacgaagatcaattagattggcaaagattcattgctgcgcacggatatggtgtgactcctgttcaggatagaaactattttaatgcggtttacttcagagaacatggggaaatcttatttgagatcgcaactgatccgccgggctttgcccatgatgagtcacaagaaacaatgggcggaaaattgatgctccctgagcagtatgaaccgcaccgggcacaaattgaacaagggctgctgccgtttgaagtaagagaattagattgatttgacacataaaaaataaagaaacatatagtcaattgatgattgctggatggtaccgtccagcaaagaatcagatgaaatcaaagatgaggagagataaaaatggaagatgcaggactattacttattcgaatcatgattggtgtggtgtttctgttttatggatcacaaaaattattcggctggtttggcggatacgggattaaaggaaccggacaatggttcgagtcaattggagttaaaccaggcaatgccgcggccgctttatcaggtctcggggaactcgcaagcggaattttatttattttaggtgtattcctcccgcttggagctgctatcataacgatcattatgttaggtgccattgtaaaagttcatggagcgaaagggtttgcgaacggtgccggcggttttgaatataacgtggtgctgattgcagtctccatcggagttgcactcatcggttcaggagcttacgctttgcatttttaatataagtatctaagaacagttactgaaaagcggtaactgttcttttatttttcaagcacgacgttaaggtgctctgaatcgcaaaaaagcggatatgatcaatataaatgtgtatagtgaatgtacgagtattgatgagcttggtcatgaaagacgagccgatttgaaggagggttttgatgaaagagctgacagacttacattcattagattctatcgagaattttattaagcagcatcaattcagttttatctacatttcaagacctgcctgtacagtatgtcacgctgttctgccgcagctcagaaaagttttggatcagtttccgaatatcaaattggggcataccaacgctgacgaggtagaagaggttgccggcagattttcagtcttcactgtccccgtgcttcttttgttcattgatgggactgagtttctgagagaagcccgctttgttcattttgaacagctcgaaaaaaggctgaaaagggtttatcagttatatcaagatgtataaagcgttactttacaaataaaaagccccctttaaggggctcaggctgtctagaaaatctcgacagcctttatttttcccttaaaatatccattcccctgtcatataataaaagacccgcacaagagacgcttctcaaaatacagccgaattcgttctgtttgaccaactcgttgaagaggatcacctgcttcgaaaaattgatcagtacatagacttctcttttatcgttgaaaaggtcaaaccttactgcaacgaaaataaaggccgcccctcacttgatccgctgatcttattcaaaatgatgttgaaggttgccgcatacccagccaagcaaggctgggcatatgtaaagaaacagcaaaaaacaaaaaagcttgcagaaaaaacatcattttctctacaagctgaaggccgttatccggccttttttacattattcggaccggggttctaaaaaacgggaccctcccaagtcttttctcatcagatagatatggaaaaaatattctccgacggcgatgatgacggcggaaatgagagcggcaaacgccagtcttcctccggaaatgcccatggacagcggcattcccatcagccagacaacaagaaacgcgattccgaaatcagcggacgccgccgtgatattattccatctcggaagcacgtacaggtcgcccgtaaagtaggaaacggctcccagcacaatggtcatcagcagcacgtcaccgaatgtaaagcgaaaacctaagccgagtatcagatacagaataatgatggtcataatgcctttaatggcaagcgctttaatgtgttccattcgaattcctccttatggaaatcatgttagtatgtttcctcataacgtgaaatataaacccttttttcgtgaacatttgttttctggcttttggctgtcatcactgggccgctgctgaatatgatgaaaggagaaaatacgggaggtgtcatgatggcagtcgtaaaagcgtcgagcgccgatgtcgatctaatggcaaggctgctcagggcggaagcggaaggcgaagggaagcagggaatgcttttggtcggcaatgtgggaatcaatcgggtgcgggcgaattgttctgattttaaaggcctgcgcaccatcaggcagatggtgtttcagccgcacgcgtttgaagcggtgactcacggatacttttaccagagaccgcgtgaatccgagcggaggcttgcccgcaggaacattaacggagaacggttttggccggctaagttcagtctgtggtactttaagccgccgggcaactgcccgcagacttggtatggccagccgtttgtcgccagattcagatcccactgcttctatcagccgacaggtgagacgtgcgaaaacgtgtacaatacattttaatcccgggggcaccgttcttaaaatgaacggtgtttttttaatgttttgtgaagaaaaataggaaaaaagtgcgcttgacggatgacaagccaaaaagaaacagagggggttttcttccggcggggcaaggtttgtcgaaacaatgtgaaaaatgtctcccgccgttcatttttcagccttacaaacccttcacacttcttcatagcggtttaacatttcttttttataataagggcgatcaataagacgaaaggggaactgacatgacacatgacggccgtttagatgaatggatcaaggaattggagaacaaaagctttcagaacaatacgtttgaccgccgcgcatttatacagggcgccgggaaaatcgccggtctttccctcgggttagcgatcgcgcaatccatcggcgcgtttgaagtgaatgccgctccgaaattttcaaactatccgttcaccctcggcgtagcttccggcgacccgctgtctgacagcgtcattctctggacgcgtcttgcccctgacccgctgaatgggggcggcatgccgaagcaggccgtgccggtaaaatgggaaatcgccgcagatgaacatttccgtcacatcgtcaaacgcggaacggaaatggccaagccgaatctcggacactccgtccatgtcgaggcggacgggctcaagcccaataaagtgtactattaccggtttaaaagcgggcatgagctcagccccgtcggccggacgaaaacgctgcccgctcccggcgctgacgtatcggccatgacgtttgcatttgcctcatgccagcagtatgaacacggctattatacggcgtataaacatatggcgaaggaaaagcttgatctcgtattccatctcggagattacatttatgaatacggaccgaacgaatatgtgtcaaaaacgggaaatgtcaggacgcacagcagcgccgaagtgtacacactgtcagattaccgcaaccgtcacgcccaataccgctctgatgccaatctgaaagccgcccacgccgcatttccgtgggtcgtgacgtgggacgatcatgaggtggaaaacaattatgccaatgttatccctgaaaaaggccaatccgttgaagcgtttgtgctcaggagggccgcagcttatcaggcttattatgaacacatgccgctcaggcgcatgtcattgccgaacggtcctgatatgcggctgtacaggcaattttcttatggcaatttagcatcgttcaatgtgcttgatacaagacagtacagagatgatcaggccaacggcgacgggaataagccgccttctgatgagtggagagacccgaagcgcacattgatggggacagagcaggagcaatggctcttcggaaatttagccgcctcaaaagcgaagtggaatgtgctggcgcagcaaatctttttcgcgcaatggaatttcggaacaaccgccaatccgatatacagcatggattcatgggacggctacccggctcagcgggagcgggtcatcaattttataaaaagcaaaaacctgaacaatgtcatcgtgctgacgggtgatgttcatgcaagctgggcgtcaaacctgcataccgattttaatcaaacgaattcaaaaattttcggagccgaattcgtcgggacttccattacatctggaggaaacggggcggataaacgggccgatacggatcagatcttaaaacaaaacccgcatattaagtttttcaacgattaccgcggctatgtccgctgtacggtgactcctgcccaatggagagcggattacagagtggtgccgtacgtgacggagccgggggctgaggtatccacgcgggcttcattcatttatcagaaagaccagacggggattcggaaggtctctcaagcggcggttgcaggcggtttaaagcagtcaaacgaggtggaagaggatcgtttcttcgcccataacaatgcgcatgaaaagcaaatgagaaagaaacgggccaaaatctcacaataaggaggcacactcatgttttcaaatatcggcattcccgggttgatcctgattttcgtcatcgctctcatcattttcggaccttcaaaacttccggaaatcggccgtgccgccggccgcacgctgcttgaatttaaaagcgccgcaaaaacattggtctcaaatgaagagccggacaagcagacggctgagaaagacaaaacggcaggctgaatcctgacatgggggcagacgaatccgcttctgcctctttctctataaggaggatgtacgattggataaaaaagaaacccacttgatcgggcatttagaggaagtccggcagcgtctcattaaaatcgttatcgcctttctcgtgttttttatcggcgcctgctggtttgtgcaggatatttatgactggctgatcaaggatttgcatggcaggctggccgttttagggccgagcgagattttatgggtgtatatgatgattgcgggaatatgcgcccttacggcagcgattccggttgcggcctttcagctctggcgttttacggcgccggctttgaccccgttcgaacgccgcgccgctttgctttacattccggggctttcgcttttgtttattatcggaatttccttcgggtattttgtgctgtttccgattgtgctcggatttttaacacaattatccgccggccattttgacatggtatttacggcggacaagtattttacctttatgctgaatcttacattgccgttcggatttttgtttgaaatgcctctggccgtcatgtttctgacacggctcggaatcgtgaatccaacccggctggcaaaggcgcggaagctttcgtattttttgctgatcgtcgtctcggtgctgattacgcctccggattttatgtctgactttctcgtcatgattccgctgctcgtcctctatgaaatcagtgtgacgctgtcccgcatcgtttaccggaagaaatgggccgaggtgtctgccgcttagtgaagctcgcctccgccggtctcaatatcgtcctcatgcgccgcggcggtcaccgcggcgattttgagcgcttttgtcacgagatccaggctgaggctcggcgcagacttctgcaaggtttgctccggaatgtacgggatgtgtataaacccgccgcggatgtgcggatgatggcaggcgatttcatccatcagcccgtaaaagagatgattgcatacaaacgtccccgccgtgtaggatacagccgcgggaatgccttcctttttgatttcctcaacgatccgtttgatcggaaggccggtccaataggccgcgggaccgctttgagaaatgttttccccgacaggctggtttccttcgttatccggtatgcgcgcctcattcagattgatcgcgacccgttccggcgtgatctgcattctgccgcctgcctgtccgacacaaatgataatgtcaggctgatgctttttgaccgcttcgcgcagcacggcaagagacttataaaaaacggtcggcacttgttcggatacgatagaggcagggccttcatgggaaccgtccagccgtttgaccgcttcccatgaaggattgaccgtttccccgccgaaggggtcaaagcctgtcagtaatacttttttctccatataaaaccctccttttctttttaccatactctataatggacatatattcctgccgaagggggaaccatgtcttgaattcgcctctggtgcaataccgatctttatttccggtgctccgcacacatacgatgctcgccagctgctctcaaagcgctcttgccctgccggtttcaaaagcggtcaatgactatcaggaaagcctgtttcagcatggcggaaactgggaagaagccattggacgtacggagcaggcaaggtgtgaatttgcaaaattgatcggcgcccatcctgaagaaatcgccgttttaccttcagtaacggctgctgtctctgccgtcgtttctgctttaccggattgccgaaagaaacaggcggtgtatacggaattggattttccggcgatcgcccacattttgaaggcacagactgagatggagctttcagtcgtgccgtctgaagatggaatgatcccgttagagcggtatgagacgtacatatcggagcagacgcttttcacctgtgtgccccatgtgtcatatacgtcgggttttgtccaggatataaagcgcattgccgagatatccgcaaagaagggatcgcttctttttgtcgatgcttatcaatcggcggggcacatcccgattgatgtaaaagaatggggagttgatatgctggccgcgggtgcgagaaagtatatgctcggcataccgggaacggcgtttctttatgtcagaaaggaacttgccgaacggctgaagccgaaagtcaccggatggttcgggcagcagcgggcgtcgatgccggatttaacccgtttttcttatgcggacggagccaaacgctttgagaccggaaccccggcatttatcagcatatatgcggcacaggcggctttatctctattaaacgatgccggcacagaccgcattcaccaagaagtaaaaaaactcagcgcatttgcgtatgaatacgcttctgaaaaaggactgaatctcacagggccgccgtctgccgatgacagacccggcatgatttccatacgggatgaaaaagcggcggaaacggctgcgctgttgaggcggaaaaacatcgtatgcgcatccagcggacaaatcatccggctggcgcctcatttctataacacagctgacgatctgatctatgcgattgatgaactggctgaagcgcgcggtatataaaaaaacagcagactcacggggagtctgctgttttcttatgaatgattcactttgacccgtttcataaagaaagcgctgatcaagccgataacggcgacaatcatcgcaaagataaaggcgtgctggacgcccgcaatcagcgcgtgagagtatgcggaaggatcattcgggtttttcgcggtgctcatataattcttctggccggcagccatgatgctgaccgccaccgcagtgccgattgcgccggccatctgctggagcgtattcataatggctgttccgtccgggtaaaattccggcggcagctgatttaagccgttcgtttgcgccggcatcatgatcatggaaatgccgatcatcaggcatgtatgaagcgcgacaatcagaagcgccgtagaagcgccgttaatgtttgagaaaaacgaaagcacagttgccgtgatgacaaacccgggaatgacaagccacttcggcccgtatttatcaaacagacgccccgtcaccggagacataaagccgtttaaaataccgcccggcagcaggatgagcccggacgtaaacgccgtcagcatcagtccgctttgtaaatacataggcaataggagcattgtcgataagataaccatcatacagataaacacaatcacgacaccgagaacaaacatcggatagcggaaagcgcgcagattcatcatcggctgcttcattgtcagctgcctgatggaaaataagatgagcgcgatcgcgccgacagtgagcgaaccgataaccgtcgggcttgaccagccgtctgatccttcgcctgcattgctgaatccgaatacgatgccgccgaacccgatcgtagacagaataatggaaagcacgtcaattttcggttttgtaatgtcagacacgttctgcatgtaggcgatgccgaataaaagagccaacacaagaaacggcagggaaatccagaaaatccaatgccagttcaaatgctctagcacaagccctgaaaatgtcggaccgatcgcaggagcgaacataatgacaagcccgatcgtccccatcgccgctccgcgcttatgcggcgggaagatgacgaggattgtattaaacatcagcggcagcagcagcccggttcctaaagcctgcacgattcttgccgccaaaagaaacggaaagctcggcgcaagcgctgcaatcagcgtgccgataatggaaaaagcgagtgaaacgatgaacagctgtctcgtcgtaaaccattgcaaaagcagacccgataccggcacaagaataccgagaacgagcagatagcccgtcgtcagccactggacggtcgcaggagtgatatgtagctccttcatcagatcagtcaaggcgatattcagcgccgtttcactgaacatgccgataaaccctgccgtcagcaaagaaatcatgatcggcatgactttatattgtttggaaggctgagcgttttccaaaatcattctcctctctttctatacgtacatgtctctcgtattttatgtcttcagcaggttggggatttgtttagaaatatggaggatcggcattttgtcttttttggctaaggacacaatgatgccgccttctatcatggcatttaaaacagtgctgatttccgccgctttctcatcagaaaaaccggctgatcttaatttgcccgcgaacagattctcccattcctgataagcgttttgacaggcctgccggagcttttcgctctttaaagcagtctcggcagccagtaaaccgacaggaaacccttcaaaattctccggacatgtgaattggcttgataagtcctgtaaaaacgcttgaatgctttccgccggatcaagatgagcatcaaggctttcttttattttcatacggatataatggctcatttcattgacagcctcaatggcgagctgctctttgccgtccggaaaatgatagtaaagagaacctttcggcgccccgctttctttaataatctgattcagtcccgtgccgtaatacccctgaagctgaaacagcctggttgccgcggcgaggattttttcccgagaatctccatagctcataatgttcccaccttactgatttgtgacaaatttaaaatatagtgactggtctattatcttgatttcgcatgacggtgtcaaggttttttaacggttattttcttcggaagaatgcctgacaagcgcgttgaccggtgagaggaaaatcatcataaataaagaaaaggagagaaaagaatgaaaaaacaattcatgcccttcattacatttatcacggctctgctcttcatcgcggccggctgctcccaatctcctcaaacgaaagaaacaccgccccagatggcagccgcagcctctgcgaaaaaagacggacttccgaatattaaaattcttgccaccggcggcacaattgcaggcgctgctccttcaaagacgtccgctacggagtacagggcgggggcaatcggagttgatgccctgattcaggccgttccggagataaaagaggccgcgcatgtgagcggagaacaggttgtgaatatcggcagccagaatatgaataacgagacactgctgaaacttgcaaaacgggtaaacaagctgctcaagtctgatgatacagacggcattgtcattacacatggaacagacacacttgaggaaaccgcctactttctcaatctgacggtcaagagtgacaaacccgttgttgtcgccgggtcaatgcggccgtccacggcgatcggagcggacgggccgtccaacttatataacgcggtaaaaacagcggctgcgcctgaggcgaaaggcaaggggacgcttgtcgtattaaatgacagaatcgcttcggcgcgttatgtgacaaaaaccaatacaaccgcgaccgacactttcaaatcggaagaaatgggttatatcggaacaattgctgatgacgtctattttaataacatcatcacccgaaagcatacgaaggatacagatttcaagatagataaacttgataaactgccgcaggtcgatattatatacggctatcaaaatgacggaagctatctctttgaagccgccgtaaaatcaggggcgcaaggcattatttttgcaggcccgggaaacggctcaatgtctgatgcggcgctaaaaggcgctgtaaagtcggtcaaaagcgggctggcggtcgtccgctccacaaggacgggaaacggggcggtaacacctaatcgagagtatgaaaaagaccatttgacagcttcaaactctctcaaccctcaaaaagcgcggattcttctcatgctcgcgctgacaaaaacgcaagatcctaagcggattcaaacctatttcaatgagtactaggagtagagaaccgggtgttctctcctttgtcggtatgccgtattaaagcataagcgtgctttcgggaaaggggcgtctttctcatttttccgctcttttttaattgttgaaaacagtaaaaaatacactattttttccttttcttctctaatagaatgaaaactgcaaaaatattacatagcaggaggaaagttcatgaaacatataaaaagcaaaatcctagtcatccttacagtttgtatgctgtccgtcatttccgtatttgccttccagccgaccgtatcgaaagcctcctcagggcataaccctgtagtcatggttcacggaatcggcggggcgtcttttaactttgcgggaatcaaaacatacttggcatcccaaggctggtcaagaaaagagatgtacgctattgatttcttagacaaaaccggaaacaacagacacaatgcgccgagactgtccaattacgtgaaaaaagtgctcagcgaaacaggtgcgaaaaaagtcgatatcgtcgcgcacagcatgggcggcgccaacacgctctattacattaaaaatcttgacggcggagacaaaatcgccaacgtcgtcacactcggcggagcgaacggccttgtgaccaaccgggcgcttccggggactgatccgaaccaaaagattttatatacatcgatttacagctcagcggacttgatcgttctgaacccgctgtcacgactgatcggcgggaaaaacgtgcagattcacggtgtcggacacatcggacttttgatgaacagccaagtaaacgggctgattaaagaaggtctgaacggcggcggacaaaatacaaattaacagtttcaaagccccggagaatgagaatatcccggggcctttttttcttccatattcttttttcgccgtaaaccaagccctctgaagttatttttgttaaaataataaagttatatcagaattcggagggtttattgtgggaaaagtgaaaagaaatgccccttgcccatgcggcagcgggaagaaatataaaaaatgctgcggaagcaaagaagctgccattccggcagacatcgcggcaaaagaagcgaaacagattcaggaaagcttaatggagtacgcctttacagcacatagagacggcatatcatcatttattaaccagcatgagttcattacggagctggacagacagactaaagacatcggagtcttcaacctcggtatctggggaattttcttccgtccgctggcaggcggcaagacgatttttgaagaatatcttcagaaaaaagccggcggcatcaaccgtccgaaaacacgggaaatcgttgaatcatggaaaagcatgacaccagcggttatggtgcttgaagatgtgaaagaaggaatgattcactttgaagatgtgatgaccaagaaacaattcaaagtggaaatggacgtcagccagcaggatcttccgccggcgggaagcctgattctcggctatccgatccacgaagcggaaaaagcggagttctttatgcagtttacgatcttccctgtgaagcggaccgaagctctaatcagcaaagtgaaaaaggcggctgccccggcccttgcggaaggaaaatcgcctgagcgctttatgcaggaggacttcgacactgtgctggccgctcttttaggaacggcggaagagcctgagcaggctgctgaagaaaaacagacggagtgggcgaacgacatggagaaggaaacggcggacgccattgaaaaaggcctgagcggggatgaatacccggctgagctggttccggccgttattgacctgtggaaaacgttctgtgtcaaaaaaacaccgacgatcagaaagccggaagctttcgcggcggcggttgaatattacgtaaacagtatttctctgaacggcgcgtccgtttctcaagccaagctggcgaagaagtacggcgtcagcgcctcaacgatttccagccgctataaggaaatcgaaggtgctctcacagatgaagccgaacgcttcgccgcagctctgacatcttaatacacagccaaaaaaccttgaagggcacatgcttttcaaggttttttctgcagaaatgctctcggggcaggataattcttaccagttatctaatactaaacagagcgataaaaggaagggagcctgagccatggatgagacacgtacgctgggcaggacggatttacgggtaaagcgtatcggctttggcgctaatgcggtcggaggacataatctgtttccgaatcttaatgatgaaacgggaaaagaactcatccgcacagcgttggacggcggcgtcaattttattgatacggcgtttatatacggtttggggcgttccgaagagttaatcggtgaagttgtcgcagagcgcggcgtgcgggacagcctcgtgattgcgtcaaaaggcgcgcacaaagaggtcaacggacaaatcgagctggacaacagccgtgaatttctccgtagtgaggcggaaaacagcctgaagcggctgaaaacagacgtgattgatttgtattacgtccacttccctgacggcaaaacaccgctctccgaagtggcgggcacgctaaaagaactgaaggacgaagggaaaatcagagcaatcggcgcgtccaatctcagcttcgggcaattgcaggagtttaacgccgacggttatttagaggtttttcaatcagaatattcactgattcagcgtgaggcggagcatgatctgctgccttattgtgaaaagaacggtatttcttttattccttattttccgcttgcttccggcttgctgacgggaaagtttacaaaagacacagtctttgaggacagccgaaaaaacaggccgccgtttcagggagaagcttttcaccaaaacctggagcgagtggataagcttcgggccgttgcggaagaaaaaggggcgcagacagcgcatatcgcactcgcgtggcttctgtcgcagccggcggtggatgcgatcattcccggagccaaacgccccggccagctgaaacacaatctgggcgcgcttgatgtgcaattgaccgaggatgaggttcaatatatcagtgacatcttcaagtgaaaataaaaaaaggaaatagcctgcgctatttcctttcttgctgtcaggacgttttcaaaaacgcttctgtcaatccttccagatcggcgtctgtatccagataccactggccgcgggcgtttttcttcatctcgatttctcttgttacggaagaagaagccggtttcaggcgcataaactcttccggatagacagaaagcaggtggctgacaatttcgttttcatcagcatcggggtgctttccggcatagtcttgcacgcggtcttgcagctggcccgcgagcggagacatatcaagcggcgtcacttttgcttcaaggacggcttttttgcctgacatggatttggtatgcaccttgagctctgtgttatcccgaagcgctgatgacatggcgtcaataatagcggaaatggcttttgaatccgcctgttcttgtgaaatgcctgcagaagcgataaagctggctttcgccgattcctgatatgcggcggccgtcattttttcatttacaccggtcaggcgggtgaaatctttattgtgcttgccgtacagcatcacatcaatgtatgcggataatgcgtccgccgggtcaggttttgcgtttgaggctgtgcctttgactttcagtttataagataaaggcttcgcgtcttttgcctgcggctgatataccaattcatatgatttgccttcgtcagccgtgaagtacagattgcccgtcactgtcttgcccgcatgaagcgtgccgctctgcatctggtcatccttatcggccgccgctgttttcgcgtcatcctgataaagcgagaagtcgctgcttttgacggtaagcgggtctttgcccgtatttttgacggtgaccgttactttcagcgcggccggatgttcagtatcgtctgaagcggcccatgccgtctcttttattttcactttcgccgtgctgctttcctggccgccgctcgtttcgctgctgcatgcggcggtaaatgccgtgagaagcagtatgaaaaacacggcgctcatttttttgatggacatctggtttaccccctgttgttataatgattaattcaatagtcatgaagacagacaggttaattatactagttttgtataaaagagtcttggtaatcatcaatctttttggaagaaaaggaagtgttatgatgaaaaaagaagaattgaaacagctggctctccggatcggtaacgtacctgcccgctacgaaagtaatgtggaagaataccaagaagatgaggttttgttttggtgggaagataagaatgatccggaagccggcatcatggtcgaattggaccgggacggaaaactgaaatccttatcccgtccggctttccggactgatctgccggctctttcggaatcggacatagaagaacggatgcgggcgtttgtagaaacccatcgtccgggggcattggctgagttcgaattggaaaacagcggctccgcaaatgatggtgatgtgagatattcctatgttcagatggctgacggtctgccgcttccgctgaccgggttttacgccgacctgtctttgacaggggaagtaaccggcttttcttaccatgggaaggctgataatctcttaagacccggaacaattgcggacaagcgggaagcattggctcactttgtcaaacatattgaagcggagctgttgttcaccgtactgcatcagtccgtctatgtgcagggggatgacaagcctcatctcgtctatgaaatcgtgtctccgacgcggccgatatcggctgacctgaaggaagagaatgcagaaatagacgaatatgaagggctggaagacgacatgctgccgtatgtcccgatttcacgccctgcacctgaagcggaaaagatgagcatcaatgacatgatcgggctgcacgacggtttttataaagagagggaaactgatcttggagacggccgcatcggcattgcatggcgtcctgaaaaaacaaaatccgtccggaaagataaaagcttagaaagtctgtttaaagaacggaatgaacatgtattgaaaacaatgcatgataaagaatcgggccggctcgccggagtgatgtcatttatacatagtgaaggcgaaccggagttttccgaggaagaatgccatcacatggccatccgctttttattcgccatgtttccggaagcggatcagtatttccgggttcaatatgatgagccggatgatgaaggagaaaacgtgggacttacatataaggcttgttcgggcggcgttgatttgcgattcggagaggggagaatctgcgtcagcaaaaagacgggtcttgtcacgttttatatgccgccggaaattgatccgaaagagctggaggaaatcgatcccgttccttcattgacaatggaagaggcgaaggacgcgatccgccgggccatcaaagccgagctcgcttgggatcgttgttacgatgacggcagctgcggaaaagtgtacaggctcgtatacaagccggttttcccgcggtttattgaggcccatacgggagaagtgatcacgagtttaataggctgaaggtcatgggcgttcgtcccgggtcttttgcgggaattgtgactattgtatgaaaaacagccgctctgaatacggctcttttccctctttgctaaaaatagacacataaaaggcactttcttccctttaaaaggataaggacgtttttatataattaaaaacagttcttttttatacactcttctgaaaggatgaccccattgctgaaagaacatctgagaaaaaaagcgctggagatcgggaacataccgccgcactatgagcttgaaatagaagattatgatgaaaaacaaaaaacgagagcctattatatatggaaagatcgtaaccatccggataaaacggtaacgattgagctgggcgacgacggatctttgcttacctattcacgcaacgactgtccgggttcagacatgcagctgtcagacgccgaattaaagctgacggctcttcggtttgcggcgagacaccgcccgcttacttttatgaatttcatctttcaggcgagggaagaacgcaatgggtgcatccgatttatctatacaaaaaaagtgctcggccggccgcttcccgattcaggttttttcgttgatgtaaccaggagcggcttcgtcgtgcagtttatctattacggggataagggtgaagcgcccgtcccggaaacattcgtcgatcgggaaaaagtcgtctcgcattatatgagtgtgctgacattcagtctcgtctatgatgtggtcaattttgagaacataccgcgtctcgtctatgaaccgattctgccggcttacagctatccggccggtgaagatgatatcgtgccggatcagcagctttgcgaagacaggaatgagccggcaaaaccgcttcctgcgtttgaacataaacgggaaatcagcctggatgaattgatggggtttacctcggatatggttcagacgcgccggcgcgatctcggggatgagatcggaacgacatggcggaaagggtcggttccggaacggaaagatttgagtatcgaaagctattttgaaaccagcaacaaaaatacaatgaagatgaaaacggacaaaaagacagggaaaatgacagcctttaaatcttttattgagcatcagggcccggccttttattctgcggaagagtgtgaggccgtcgcgcttcaatttttatacaagctttatccgagagcggacgagttttttaaaatgaacccgctgaaaacggacggaaggggcaggttccgcttccatttttccgtatggcatcaggatattccgctgcggttcggcgctgcgagaatacttgtcagtcccgtaacggggcttgtggaagcttatatggcgcctgacattgacccggagcagctggagaagatcaatccggtgccggccgttactcccgaagaagcaaaggccgcttttttatccgatttccatctgcggctggagtggcagcgcgattttacgccgtccggcaatgaaggatataagcttgtgtacaggcctgtctatcctccgtacattgatgcgcagaagcgaaaaaagaaaaggttttattagccagggatcatttgtaaatgaggataatctttaaagcctctccaatcgcctccccaatcaaaaccgagcgttttggcaatcgatacgacctcaagccaatcgggcgtgccgtttcggtttccgtcgtacgtcatatcccaaatcaggcttccatcctttttttgcagggcgaagtcgatcgcaaggccgtaattgtggtaagattccccgccttttgcgtaggtgacgatatttcctttttttgaacgtccttgacggtacaattcgttttgttcctcaattgatctgaaaccctctgtgataacgacggtgatgccttttttcagagcggccgtccgcaatagctccgcattctgtttcacgagcggatgaagagcgcttggaatggctctatcttgtaatgccgtctgcggcctcaattctttctgcacataggaaaaacataggtctgcggaaaagaagaggatcagaagcagcgaaattctgactggtagtttcatggtgaattctctctttctttaattgattaaaatctttgtttgctcactgccataaatttgctatgataaaatataacataattagtagccggaggaaggaggcaaatctatgaaatccaagattccatctgaagaagtggccgtaaagatgaatgaatggtataagctgatccgcgcgtttgaagccgataaagctgaagcgctgaagcgggagattcaatatgaactcgaagatatggaagaaaatcaggatttattgttgtatttttcattgatggaatttaggcaccgcatcatgctggataaattaaaacccatgaaagacggcgactgccagcctccgttctctgaaatgctcactgagattgagatgaaccagcaaaagctgaccggcttactggaatattatttttactatttcagaggaatgtatgaatttaagcagaaaaacttcatctcagcgatttctcattataagcgggctgaggaaaagcttgaatatgtggaagatgacatagagaaagccgagtttctgtataaaatttctgaggtgtactatcatatcaagcagactttcttttcgatgaattacgcggggcaggcgcttgatatttacaagaaatatgaattatacggaatgagaagggtgcagtgcaaatttatcattgccggaaatctgatggacgcccagcagcataaaaaagcgctggaatacctcgaatgcgccttggagcacgcggagcggcttgatgatcaatatatgattgctgcggcctattataatatcgggcactgtatgtacagtctgggtgacttttgcaaggcggcggaggattttgaacgggcggctgccggatttgaagcacacagcttccggcaggtcatccaggctgttttttcactcacgcatatctactttaaaacggaaaaatacagtgaagccgccgccagctgcgcgcggggcatgagaagcgcggcggagtgggaagatgagatctatatgacgaaattccgtctgattaaagagctttatcagggggaaggcggacaggattcgctcaaagagtattttgacatcctggaatcaaaggagctgttggctgacacagaggaactgcttcaggacgcggctcatttctttcataaacgggagaactacaaagcggcatcttattttttcagcaggcttgtcggcgtgcaaaaaaggctgcaaatgaacaactacgcataataaaaaaaagaacgagggagcttcggtttcatcgttctttttatgattccttttgttttcagccgattaaaaccgggtacatgctctgtattaacatcagggaggaaatgagacaatgtatcaggatttacaggggaaaacagcgattgtaacaggttcttcgaaaggaatcggaaaagccattgccgaacgcttcggcaaggagcggatgaatgtggttgtgaactacctcggtgattccgccggagcggaagaagcggcggatatcattgagaaagcgggaggcagagccgtcaccgtaaaagccgatgtatcctcagaagaagggattcaggcgctgtttaatgccgcgcaggagcatttcgggggcgtggacgtgatggtcaacaattccggctttaacggagcggaagcgatgccccatgaaatgagcctggaggattggcaaagggtcatcgacgtcaacgtgaccggcacctttttgggggcgaaagcggcactgaaacatatgctcgagcacggcaaaaaaggaacggtcttaaacatatcgagcgttcatcagcaaataccgcgtcctgaaaacgtgcagtactcggcatccaaaggcgggatcaaaatgatgacggaaacgatggcgctcaattacgcagacaaaggcatccgggtgaatgccatcgctcccggcacgatcgccacggagtccaataaggatctggaagatgaaacacataaacaggcccagctgaaaaaaattccgatgaacgccttcggaaaaccggaagaagtcgccgcggccgccgcatggatggtgtcggaagaagcgagttacgtaaccggaacgacacttttcgtagacggaggcatgacgctttatccgtcccagctggaaagataaaagaggaggggaaaccttctcttttttgtttagagaaggggcatacaggaaatggttctctaaaaaacaggagggccgcaagatggcgaatgactggtggaaagacgccgttgtctatcaaatctatccgcgaagcttccaagatacgaacagcgacggcataggcgacctgcggggattatcgcgcgtctcgattatataaaagagcttggcgccgatgtgatatggatctgcccgatttacccgtcgccaaacgtcgataacggctacgatgtgacggatcatcaagcgattatggaatcatacggaacgatggaggactttcacgatctgcttacagaatgccgcagccgcggattaaagcttgtgatggacttcgttttaaatcatacctccacggagcatccttggttcaaagaggcggaaatgaatccggacagcaaataccgcgattattatatttggcggccgggcaccgcggagggcccgccgaccgattgggtgtcggattacggacaatccgtctggcagtacgaagaacatacgggcgaatattacctgcatatgaacgccgttaaacaagccgatctgaattgggaaaatcccgaggttcggcaatcagtatacgagatgatgagattttggctcgataaaggcgtggacggattgcgaatagaccagcttcatcttctgtcaaaaaaagaatacttgccgccatatgaagattacatcgcccgccgggcagatccgaagcctttccggccaaacggagcacggatacatgattacttaaaagaaatgacgaaagaggtattttccaaaatatgacgtgatgtcggtcggcgaggccggatcagtgacgcctgaggaggggctggtttacacgggaaccgatgagcatgaactgaatatgatttttcattttcagcatatggagcttgatcaaaagccgggccaagagcattgggatgtaaaaccgcttgagctgtccgatttgaagaaagtgctcacagactggcaggaaaaactggaacatcaaggctggaatacgctgtattggtgcaatcatgaccagccccggatcgtatcccgcttcggagacgaaggcaaataccgaaaggcatccgccaaaatgcttgccgccctgctttatttcatgaaaggcacgccgtacatttatcagggagaagaactcggcatgacaaacgccccgtttgacagaatagaggactatcaagatattcagaccgtcaatatgtatcacaaaagggtatttgaaatgggccgcaacagggaagaagtcatggcgtccattatggcgaaaagccgcgatcatgcccgtacaccgatgcagtgggacggcagcaagaatgccggatttacggagggcgaaccgtggctgaaggtcaatcccaattacaaaaccgtcaatgcggccgaggctcaggatgatcccaattctatattgaacttttacaaaaaactgatccgcctgcgaaaacagtatgctgatatcataaaaggcagctacacgctgctgtttcccgatgacccgcagctgtttgtgtatgaaagacaggcaaacggacaaaaaatcatatccatcagcaacgtatcgaaagaagaagccgccttttattggccggacggctccgaatctgaaagggccgagctgcttctcagcaactatgaaaataacggcggagcggaatcccgcatcacgttccgcccttacgaaacaagagtttatctgcatgcctgatatgtgatacgacgccccgtccatacatggcgggggctttttaggtaaatcggttatcaatttagaaaaaaattacttgcaaaacgtaattacttcgttttattatggtataggtaacaaatgaacgagaaagtacgctttggaaatcgtcatcattctgatttacagaacagggggaaacggcttgtttaaaaaatggagcggaatcattgtcattgcggcatgctttttaatcgcggcgggctgcggcaattcatcttcaaaaggttcgtcaggttcttcgaaaagcggcaaactgcacgtcgtgacgaccttttatcctatgtacgaattcacgaaacaaattgtcaaagacaaaggcgatgtagacattctcatcccgtcttcggtcgaaccccatgattgggagccgacgccgaaggatatcgccggcattcaaaacgccgatcttttcgtatacaacagcgaatatatggagacatgggttccttcagcggaaaaaagcatgagctctgatcatgcgaagtttgtaaaggcgtcgaaaggaattgacttgctcgaaggttcggatgaagaggaagaggaacatggacacggcggtcatgaccacagccacagcatggaccctcacgtgtggctcagcccggttcttgcgcaaaaagaggtcaaaaccattacggcgcagatcgtaaaacaggacccgaagaataaagcatactatgagaaaaatagtaaagaatatattgcaaaactgcaggatcttgataaactataccgtacaacattaaataaagcgtcgaaaaaagaattgatcacacagcacgcggcattcagctatctcgccaaagaatacggcttaaaacaagtcgcgattgcaggcctttctcctgaagaagagccgagtgcggccaaactggcggatctcaaaacgtttgccaaaaagcatgatgtgaagatcatctattttgaagaagttgcatcgcctaaagttgcagatacacttgccggtgaaatcggcgcgaaaacggaagtgctcaatacactggaaggtttaagccaaaaagaacgggataaaggcatcggttatatcgacattatggagaaaaaccttgatgcactgaaagattcgctattggttaaataacatagtgtgcgccgcggggtgcacactatttctatgcgggaaaggaaggtcagcatgaatctcgttacattacaggatatcgtttttggttattcgcatacacccgtgcttgacggtgtgtcgctggaaatcaaaagcggcgaattcgtcggcattacaggaccgaacggcgcgtcaaaatcgacgctgatgaaagtcatgctcggcatgctcagaccttgggaaggaacggccgagatcagtaaaaaaaacgctgccggaaaacgcctgacaatcggctatgttccgcagcagatttcttcatttaacgcaggattcccaagcacagttctggagcttgtgcaatcaggccgttatacgaaaggaaaatggtttaaacgattgaacgaaacggatcaccacgaggtggaaaacgcgctgaagatggtggaaatgtgggatttccgccaccggaaaatcggcgatttatccggcggacagaagcagaaaatctgcattgcgagaatgcttgcaagcaatccggatctgctgatgcttgatgaaccgacaaccgcggttgactatgaaagcagacagggtttctacgaatttatgcatcatcaggtgaaaaatcacaaccgcaccgtcgtcatggtgacacacgaacaaaatgaagtacagcagtatttggataaagtcatacggcttgagaggggggaaaaaggcggatggaaatgtttgacttggaattcatgcgacgagcttttctagcgggaagcatgatcggaattatggcgccgatattaggcgtatatctcgtgctgagaagacaggcgctgatggcggatacgctgtctcatatttcattgtcgggcgtggccatcggtttttttctcagtaccaatattacggcggcgagcatcgttgtcgtcacgatcggagcgatcggcatcgaatatatgcggcgggcataccgtacatattcagaggtatccatcgcaatcttaatggcggccgggctgtcgtttgcgatgtttctgatcagcctgtcaaaaggcggcgcgtcgatgagcatcgatcaatatttatttggatcgcttgtcacggtcagccagcagcaggtctatattatcggaggcattaccctgctgattctgctttatttcattatattaaacagaccgctctatctgcttacctttgacgaggcgacggcgaagacatcaggcattaacacaaatctcctgtcaatgtcattcagcatcgtgacggggctggcgatttcggtcattattccgattatcggcgtgctgcttgtttccgcgctcctcgtactgcccgcggcttttgcaatccgtatcgccaaagggtttaaatgggtgtttgcggcggccattattatttctcttttcagtgtgttcatggggctgacgtcttcgtaccagctcggaacgcctccggggccgtcaatcactttactgttaatcattctgcttctgctcggctttatgctgcaggggatttggaatgcgtttaaaaaaggaaaagaacgaaaaaaccgccgttaagcggtgcagcagtctcatctgctgcgccgtttgacggctttttttacagaaatatatcagcaagacgctcatatgactctttttttgcttcgaaatcaaagacgttgcacagcaccatcatctcttttgtctgataacgttcggaaagttcaagcagacggcgtttcactgcggcagcagagccgatcaccatccgcttcctattttctgcaatctgtttacggtcctccggcgaatacggataagccttcgcttcttccacactcggcacgcggctgtcggcgccttttccgacacgaagaagccataaatcctggcttaaggcgagttcttccgctttctcatccgtagctgcgcatatgacgaaaatggcacagagtgaggccggagcggaaaaatgggaggaggcccggaaatggtcccgatagatctgaaaggcttttaccccgcgttccggattaatgaaatggccgaagacatagcccgcaccttgaagagcggcgcgtctggcgctgttttccccgaggcccagcacccaaagctgcggggctgtttcaatcaaaggcgctgtttttattccggcataagcatggtccgagggaaccgaatctgtcagaaaggatgataaatcctgaagctgcctgttgaactcggtcatacttttctttaccccgtctgtgagggcgagccggattttcgtcgtgccgcccggtgagcgtccgaccccaaggtcaatccggttcggatgcagcgcctcaagctgacggaaagtttccgcgactttataggggctgtactgcggcagcagcacgccgcctgatccgacacggatggacgttgtggctgcggcggtatgagcgatcataatttccggcgaaacgcttgcgagccctcttgtgccgtgatgctcggcaaaccagtaccgcttatagccccatccttcgctgaggcgggcgagctccgctgaacggcggagcgtctcgtgcggcccgtttcctttggatacgggcgcctgatcaagtatgcttaaatcaatcactcgtctgcccctttcctgacatgtattgatacaaggataggaaaaatgttcagtccccgtcaatttctttgttttctctattctctccggaacgaaggagaatataggaagtaatttttcgccgtttttcgccaaaaattcttatgttttatgaaactttgatataataaaagacgtataacttaataaacaccgggattcttgtcccggaatttagtaaaaatgcgcacttgcggcgtgcttagcggcacccttacagaataggagtgaatcatatggcgatctctttacaaaaaggacagcggattgatttaacaaaaggaaaagccggcctgtcaaaactgctggtcggactcggctgggaccctgtatcatccggcggctttttcggaaagctgttcggcggaggcggtgccaatatcgactgtgacgcttccgtactgatgcttgaaaatgataaaatgacagacagcaaaaacgtcatctatttcggcaatctgaaaagccggtgcggcggtgtcgtacatacgggtgacaacctgacgggtgaaggcgacggtgatgatgaacaaattctcatcgatttgtcgaaagtgcccgctcagattaataaacttgtgtttgtcgtcaatatttacgactgcgtcagacgaaaacaggacttcggcatgattcaaaacgcgttcatccgcgtcgttgatcaggctaatcgcgaagaactggtgacttacaatttaagagataactattcaggcagaacgagcctgatcgcggctgaaatctaccgcgaggacggcgagtggaaattcgccgcagtaggagaaggcacaaacgatacaaaaatcggcgatatcgttaaccgatacgcctaaacgataaaaaggagagtgcacacatggcaatttcattggcaaaaggacaaaaagtagatttgactaaaacaaatccgggtctttctaaagtcgttgtcggccttggctgggatacaaacaaatacgatggcggacatgattttgatttagattccagcgtctttctattaaatgaagcaggaagatgcgcgtcgcccgatgattttattttctataatcagcttgaaggcggaaacggctctgtcgcacattcaggcgacaaccttacaggccagggcgagggcgatgacgaaagtgtaagggtcaacctgagcgcggtgcctgccgctattgacaaaatttcattcgtcatcacgattcatgaagcggaagcgcgcggccaaaacttcggacaagtttccaacgcgttcgttcgcattgtcaatgaagagacaaatgaagagctgatccgctacgatctggctgaagatttctcaattgaaacagccattatcgcaggggagctttacagacataacggcgaatggaaattttccgcgatcggctcaggctatcaaggcggactggcccgtattgcgacagattacggcctgcaaatcggctaaaaccatatcaagcacagaagggagagacggcacatggctattcaattggcgaaaggacagcgtgttgatctgacaaaaacgaaccccggtcttacaaaagcggtgatcggcttaggctgggatacgaacaagtactccggagggcatgactttgaccttgacgcgtcggcttttcttgtcgatgcccatgacaactgtgttaatgatcttgattttgttttctacaataacctggaacacccgagcggcggcgtcatccatacgggagacaaccggacgggcgagggagagggagacgatgaacaaattatcgtcgatttctcaaaaatacccgcaaatattgaaaagatcggcatcaccgtcacgattcatgatgcggaagcgcgcggccaaaatttcggacaagtttcgaacgcgttcgtgcgcgtcgtcgatgaaaacagccagaatgaactgcttcgtttcgatttaggggaagacttctcgattgaaacggcggttgtcgtttgtgagctttaccgccatggggctgaatggaagtttaacgccatcggcagcgggttttccggcggtctggcatcactttgccggaattacggcttgcaggtgtaagcaggaaattaccgttttactaaataggaggaaaaaacttggattttctacatcatattatgtcgacctacgcttccttttttgattggaaaatgtggggtgaggtgctgactgaccctgtatcatgggggctgatcggttccttggttctgctggaagggctgctgtcggccgacaatgcgttagtgcttgcggttatggtaaggcatctgcctgaaaaacagcggaagaaagcattaacatacggattgttcggggcatatattttccgctttatctttatcggaatcgggatgctgctcattaagttctggtggatcaaagtgcttggcgcgctgtacctggcttggctcgtcattaagcatttctggatcggagaaggtgatgacgatacggaaggcatgaagaaaaattcatggatggtccgtacgttcggaattttctgggccactgtcgtttcagttgagttaatggatctggccttctctgttgacagcattttagccgcgtttgcggtatcggaaaaagtgtgggtgctcttgatcggcggtatgctcggcattctcatgatgcgtacagtcgcaaaagtattccttgtgttaattgataaaatccctgagcttgaaaacacggctttcgtgctgatcgggattatcgccgtgaaaatggcggcgagcgcttttgattatgaaatgccgcacgtggtgttcttcggaatcatcatcgctgcatttgtggtcacgtttattatccactatttcaacaaacaaaagcaggttcaggagcagacggctgcatctaaagaagaataaaacaaaaaaggagggagagttcatttccttccttttttgtaccgattatcatgaagagaaaggaggaaaatgatgaagcaggaagaattggtgatccgaaaggccgagccggaaaacgatgactgggaaacgtttctgatgcggccgctgccggaacgtcccggttacgagcgggaaaacgggctggcgtttacccggcttgccggccggattttgggcactccttatgatgagacggagtattacagtaagcttttcgagctgtcttctcatgaaaacatccatgtgttgagcgagacgctggataagaccatcgcgccggaaacgtttcaggcgctgcagcacattcattcggtcaatcaaaaagagaaagggctttcggtttccaggtttgtcgcgtttctcgatgggggcaggctgcttgccaaacacgctgatccgcttatgcaccgccggctgaggaccgcgtttatgacgcttttggaaacctttgcggaccggcatgaaaacgggctgaatcatcccgatttccggcgtgtgctcttggatgtgtcaaagttttcgctgaaccacctgaatccatggctcgaacaagccgatatagagtgtgagatgccgaaggtggtgtggtatggagacgcgaccaaaagccagctctattttctctattatctcatgctgatcggctgtgatgtcctattgtttcatccggctgcggaagatccgttcagcttgattgatccggatgaggagctcagctttgtgataaagctccccgcaacaggcggtcttgagccttttccgaaagaaaagccggacagaacgtccacgacggcctaccggtcaacgaaagaaattgagcatgtgctgaaccatgaggaatccatgatgtataagccttggcagttcagggagcacaccccgcagtccgtgaccttaaaaacgacgtatgatgagttatttctcattgcgaaggagcgggcgtttatccggccgcaatttaaagcggacagggagcgggtggccgttccgaacctttttgcgaaagtgatgggggtttccaaagatacgaaagaatattggaacagactccataccgccgcggactatcaggagacacacatgatccgcagttttccgtttacggaagagctgaaagccaactaccagtatcactacagtcaggttttaaatgaaaaaggagagattgacgcggacaggctgaaaagaagcaacatctggcagtacaagcatctgccttcaggtgtgcagagcgccatcgccaatgtgatttctgacatgtgcagaaacccagggctgaaggctttgcccggggagcagtcaagggatgccgcaatctatttgttccgccaggcgacgaatctgcccgcttcgctgctgcaattgattcagacgtttgattacgcccaaaccgttccgaaactcgttttatatcatacggaacaaaatggcgaactcacacgttctgatgccgccgctcttttgtttttaaataaattcggcgtcgatatcatcttgtataatccgccgggccatcaggacattgagcattatattgaagaaagccaatttgatgtccattggctggaggacatggtgtttcggcaggaatataaggagccgtcactcgtaagaaagctgtttagaaccattacgcaaaagcagggagagtaaataaatatgacagaaaatcaaaatccgcttgttcttgataaaaatgaagagatttctgaacaaaaagcagatgacatcagggcgcagctgcgccaagaccctgaggtgcagcgcatttcgcagcagattgacgtgaaaaaccaaatggagctgcttgagtacggaaaagaaccggcagttgaaatctcgaagttctccgaccgcatcttaaatatgatgaaaacaacaagtgtcacggattcaggcacaatgctgacgcagctcggaaaaatcatggaccgtttcgacaaaaatgatttcgatgaaccaaaaggatttctcgctaaaatgttcaaacgcggcaacagcatgattgaaaagatttttcaaaagtaccgcaccctgggcggagaaattgaaaaaatccacgtcgaaatttcaaaatacaaagatgaaatggcaaagacgaaccatacgcttgaagagatgtatgaaaacaacattaactactacatggagcttgaaaaatatgttgtcgccgggcagatgaagcttgaggaaatgcaggcgctcattccttcttatgaagaaaaagcggccggcggaaaccagcttgcgcaaatgcagcttgatacgctgcgtgacgggcttcaggcgcttgaggaacgtgtctatgatttagatatggcgcggatggtggcgctgcagacagcgccgcagatccgcctccttcagcgcggaaatacgaagctcatcggaaaaatcaattccgctttcgtcattacgattccgattttcaaaaacggcatcattcaggctgtcacagtcaaacggcaaaagcttgtggctgattcaatgagcgagctggaccgccgcacgaatgaaatgctgaagcgcaacgctgaaaatatttcaaaccaaagcgtggagattgcccgtatggcaggccgtccgagcattgacattgagacgattgaaacgtcttggaatacgattgtcagcggtatgcaggaaacgaaacagatcgaggaagagaacagacgtatcagagaagacggagcgaaacggattcaacagcttcaggataatattaaaaacgcagtcttaaagaattaatctgcaccccgcttgcttacggcaagcgggtttttttgcgaaaaaagataatgacaatgtgtaaagacaggtgtaaacttatacggtaatcattttcgatttgaggtgctgcttatgaacaaacaacctgccgtcactccgcgaaaacttctggcgattgccggaatgggctggctgtttgatgcgatggatgtcggaattttatcgtttattatcgccgcgcttcacactgattggaatttaacacccgatcaaatgaaatggatcggaagcgtcaattccatcggtatggcagcgggcgcctttttattcggaatgctggccgacaggatcggccggaaaaaagtgtttatgatcacgctgttattcttttctgtcggaagcggcatatccgcttttgcaacgggattgacggtttttctcatattgcgttttctgatcggaatggggcttggcggggaactgcctgtcgcctcgacgctcgtgtcagaagcgtccgctcccgaaaagcggggacggatcatcgtgctgcttgagagcttttgggcagcgggctggcttcttgcggcggtgatttcctactttgtcataccgtcattcggctggcaggccgcactgctcttaacggcgctggccgcgttttatgcgctgtacttgcggaaaagccttccggaatcaccggcgcatcaggcattgacgcagaaaaaaagcatacgcgggcaggcgggaagtgtctggacgaaaccgtatatccggccgacggtgctgctgtctgtcgtttggttctgcgtcgtcttttcttattacggcatgtttttatggctgccgagcgtgatgctgatgaaaggctacagcatgattgagagcttcgaatacgtccttctgatgacgcttgcccagcttcccggatatttctcagcggcgtggctgatcgaaaaagcggggcggaagaccatcttagtcatctatttgctcggaacggcgggcagcgcttatttcttcggtgccgcggattcattggccatgctgctcacggccggcatgctgctgtcctttttcaatctcggcgcatggggcgtgctttacgcctatacaccggagcagtaccctgcggcgatccgcgcgaccggttccggaacaaccgcggccgtcggcagaatcggcggcattttcggtccgcttctcgtcggatcgcttgcagcacggaacgtttcgtttacagctattttcgctgtcttttgtgcggccatcctgattgccgtcatcaccattattattctcggaaaagaaacgaaacagacagagcttgcgcaatgagcacccttttggggtgctttttttagtgagctgtctgttggcagacctatatttttccttaaaatcccttattttcaggaggcgaaaacttctttttccgggacaatgtcgcaaaaaaattcttgtatttgtaaaaaaaggataggaaatcagtttgcagcacattcgatggaaacgttctcaagcctgataaaagcccgatttcctttataatttatcctcaataaggaggattagagagtatttagaagcataccagaggaaaataagacacagggatgtttttaaagtaatgatacaaaataaacgggattatgatgtttgtttgacttattacaaacgtgttacggtattaaagattgcttattatggagggaaaatatgaatttggatgagaaaccaattaagataaaagtcgaaaatgtatctaaggttttcggaaaacagacaaaaaaagccattcagatgctgtccagcggaaaaaacaaaaaagagatcctgaaagcgaccggatcaaccgttggtgtcaatcaagcaaactttgatgtatatgatggggagatatttgtcatcatgggtctatcggggagcggtaaatcaactttagttcggctgttaaaccggcttattgaaccgactgccgggaatatttatattgatggtgacatgataacaaatatgtcaaaagaccagctccgggaagtgcgccggaaaaaaatcagcatggtctttcaaaaatttgcgctgtttccgcacagaacgattcttgaaaatacggaatacgggttggaactccaaggcgtcgacaaaaaagagcgtgagcaaaaagcgcttgattcgcttaaacttgtcggtcttgaaggctttgaacaccaattcccagatcagctcagcggaggaatgcagcagcgtgtcggacttgcccgcgcattgacgaatgatcctgacattcttctgatggatgaagctttcagtgcgcttgatccgctgatccgcaaagacatgcaggatgagcttttagaccttcatgactctgtcggcaagacgatcatcttcatcacgcatgatcttgatgaagcattgcgcatcggcgacagaatcgtgctgatgaaagacggtaacatcgttcagatcgggacgcctgaagaaattctgatgagcccgtccaatgaatacgttgagaaattcgttgaggacgttgacttatccaaagttctgacagcgggccacatcatgaagcgcgctgaaaccgtgcggattgacaaagggcctcgtgtagcgctgcagctcatgaagaatctcggtatttcttctatttacgccgttgataaacagaaacagcttctcggcgtcattcacgcggcggatgcgaaaaaagcggtggaatccgacttatcgcttcaggatattttaaatactgaatttacgactgtgcatgaaagcacatacttgacggaaattttcgatgtcgtgtctgatgcgaatattccgatcgccgtcacggacgataaggaccgcatgaaaggcattgtcgtaaaaggcgcattaatcggcgcgctttcaggaaataacgattatataaatgttgaagattctgctgaacaagctcaggattcttctgttcagggggtgaagtaaatggacagattgcctagaattccgttagcagatatcgttgaccggtttgttgactggcttaccatgacgttcggaggtttctttgacggaatctcaaacggtttggccgctttcgtaaacgcgattgtgagcggtttgggtttcatcccgtctattttattgactgttatttttgcagctctcgcttggtggatcagtacgagaggaattgcactctttacgttaatcggattccttgttattgattatttgggttattggtcgccgatgctgcaaacgttggcgcttgtcgtcacatctgttttgatttccattattatcggggttccgatcggcatatgggcgtctcagaaagaaacagtccgccgcattgtcacaccgattctggatttaatgcagaccatgccggctttcgtatacctgctgcctgcaattttcttctttaatatcggggttgtgccaggcgttgtggcatctgttattttcgcgatgcctccgacgatccgcatgacagttctcggtattaaacaggttccggctgatctgattgaagcgacggaagcattcggttcaacgacgtctcagcgtctgttcaaggtgcagcttccgcttgccacaaaaacaattcttgccggtattaaccaaagcatcatgcttgctttgtcaatggtcgttatcgcggccatggtcggtgcgccgggcctcggttctgaagtatacagcgccgtgacacagttgaaaaccggtgtcggagtggaagcgggtatcgcgatcgttatcgtagcgattacactcgaccgtatcacgcaaaacattaaagtgaagaagaagagcagggggaatgcctgatgcttaagaaaatcatcggtgtcggcgttaccgctgcgctggctctttctttggctgcctgcggttcgcagactgatgataaggcaacggctgcggaccaggtgaacaaaaccattatcggtatcgatccgggatcggggatcatggccctgacggatgaggccgtgaaggattacggattgaaagactggaatgtcatcacggcgtcaagtgccgccatgacggcgacattgaagaaatcatatgaccggaaaaagccgatcatcgtaacgggctggacgccgcactggatgttctccagatacaagctgaagttccttgatgatccgaaaaaaacgtacggaactgccgagcagattcatacgattacaagaaccggcttcagtaaggaacagcctaacgcggccaaagttctcagccagttcaaatggacgcaggacgatatgggagaagtcatgattgccgttgaggaaggcgaaaagccggccaaagccgcagctgaatatgtgaaaaaacataaagaccaagtggctcaatggacaaaaggcgcccataaagtcaaaggggataaaatcaacctggcttatgtggcatgggacagtgaaatcgcaagtacgaatgtaatcggaaaagtatttcaagacctcggctatgacgtgaagctgacgcaagtggaggcaggaccgatgtggactgcgattgcgacaggcagcgcggatgcgtcattgtctgcttggcttccgaatacccataaggcatatgcgtctaaatataaaggcaaatatgaagatgtaggaacgagtctgacaggcgtcaagatgggtctggtcgttcctcagtacatgaaaaacgtcaattcaattgaagatctgaagaagtaatgaagaaaagcagccctgtaacgggctgcttttttttatgcttcaaacgatttgaggacggcggccgttaatatctcagcgccagtaaagatggcgcttcggtcaaatgtcatttggggatggtgaagtccaggctccagaccgcatcctaggccgagcatcgtcgttttcaagttcggcacctttaacccgtaaaagtgaaaatcctctcctccggttgtcacaagaggttcatccacatgttcttctccgagaatgctgctgatcgcagatgtcatgatggcttccgcctccttgtttcgctcggctgccgggaggctgtgttctttttgcagttcgatttttgcgccgaatgcggcagccgccgcctcacaggctctttcggtttcggcggttaatttctccatggcggcattggtttgtgcgcggagatcaaggctgaacgatgcttttcccggaatgatattggaactttctccgcctgcctgaagctttgtcatcttcacggaatgcgggatgccgggatcaagatgaatgaagctgagtttttggacgagaagagcggcgatttcgatactgttaagcccgagatgcggtctcgcgccgtgggcttcttctccgataatcaggccttctatatgccggcttgagccatgcagaatggacggtgcgcatcggccgtttgccgtttcctgtacggggcgcacgtgcacgccgtataagaagtcaacatcatccagtacgcctttttcaatcattttcagcgctccgccgcctttttcttcagccggctgaaaaataaagcggatggtgcccttcggaagcttcggctgactctttaaaagcatcatcgtgccgagcgccatcgtcatatgtgaatcatgtccgcatgaatggttcgcctgaaagacaccgtccacttcctgccacagcgcgtcaatatccgcccggacagccacaacgggcgagccttctccgatttcgccgacaacaccggtgcaatcatcaaacgtacggattcggcagccggcctctttcagtttttcagtcagatattcagttgtttgatattctttccagcttacttcgggattggcgtgcaggtggtcaaaaatgtccataatgacttgcttttcatgctctgtgagtctgttcatgccgtaagtcctccttcaaaagctgtctgttttttatttttgatattgaaaacaggcaatcggtctgtatataatatagcacatatctgtattttctgaatagtttataaattcaaagcgggatggtgatgttatggctgtgccgaaggccgaacctgtattgaaaaagaagaaattgtttgtgatgcctgatgcttatgtgctgctgttcattgtcgctttactatgcgcgatagcatcatacatcgttcctgcgggggaatttgacagggtgacaaagggcagtgtgacgtccgccgtcccgggaagttatcattctttagaccagtctcctgtcagcccgatcgctttttttaccgcgattcaggaagggatgacaagttccgcgccgattatttttttaatcctgtttacgggcggcaccattgcgattttggagaaaacgggcgccatcaatggattgatcagtaatgtcatcagtacgttccgcaccaaacagctgctgtttattgcaattgtcggatctctattttcgatcctcggcacaaccggcatcgtcgttaattccgtgatcggttttattccgatcggcctgatcgtcgcccgttcgctgaaatgggatgccgtggccggagcggccgtcatttatatcggctgttatgccgggtttaacgcgacgattttatcaccttcaccgctcgggttatcacaaagcatcgcggagctgccgctgttttccggcatcggcctgcggattgccgtctacatttgttttctgctatcatctattttatatatttatcggtatacgagaaggctcagaaaagcaaaggacgccagtctgctggggaacgattggtttccggcagcaggttcaatcccgcaggcttcagatccggaggacaagccagtcccgtttaccgtccgccataaattgattctggctgtcgcggctttgtcgcttgccggctttttatacggcgcgcttactcttgactggtctgattcagagatggccgccgtgttcatttttatctcaatcgtgtcaggcctgattgcgggaatggcggcaaatgatatcgcaaaaacgtttattacaggctgtcaggggctcgtttacggcgcgctgatcgtcggaatggcgagaagcatttccgttattctggaacacggaaagctgcttgatacggtagtcaatggacttgcgtcactgctgcacggtttcagcccgatggcaggcgcaatcggaatgtatatttccagcgccctgcttcattttctgatatcatcgggctcaggggaggcggtcgtatttattccgattttggcgccgcttgccgatctgatgggcatcacgagacaggtcgcggttgaagcggtcatgcttggggaaggcgtcgtaaactgtgtcaatccgacttccggcgttctgatggccgtactggctgccagcggcattccgtacgtaaagtggcttcgcttcatgattccgctggcgctgatttggtttgtcatcggccttgtgtttatctgcataggcgtcctgatcaattggggcccttattaacatttttgtcaatgatatttcggtttatcattatgaatcggcaagatataatgggagttgtaagccattcttaatagtacgggaggaagtcatgaatcagcgtcggaacagactttcaaacgtgaatggaaagagtgagagtgtgaaagagaaagaacgaatgatttggtcagaagtcggaatgcttgtgggcacactgtctttgcttgacatcatcgtacgcggacttgttctgaactgtccgtttagggaatgggccgggagcttggcggttttcttcattataattgtttattattgcatcagggcgggagcgtcgggaatgctcatgccgagaatagacaccaaagaagaactgaaaaagcgggtgaagcagcagcggatagattcaatagcagtcacttttgcggtggcggcgcttacgatgtacgacagggggtttccccatacattctttgcttggctgaaaatgatctttctttttatcgtctgcggaggcattctgtttctgcttcggtatgtcattgtgaagctgtcttacagaagagcgataaaagaaataaaaaagaaatcatcttgacaggtggtttctttttttgtttgaaagcgggaagtctttttaattgataggaatatagatttgaattcactctgccgcgttgctttgatagagagagtgtgataagttgaaatgtaagcgttaacagaattctccagtcttcacaacagttgaaaggagctgaagaaagagtaagaggaatttttgactccgcagtcagtcttcaaaaatgaaataaggagtgtcaaaaatgtttgaaaaacgattcaaaacctctttactgccgttattcgccggatttttattgctgtttcatttggttttgtcaggcccggcggctgcaaacgctgaaactgcaaacaaatcgaatgaggtggccgcgtcatcggtcaaaaacgggaccatccttcatgcctggaattggtcgttcaatacgttaacacaaaatatgaaagagattcgtgatgcgggctatgcagccattcagacgtctccgattaaccaagtaaaggaagggaaccaaggagataaaagcatgaggaactggtactggctgtatcagccgacatcgtaccaaatcggcaaccgttacttaggcactgaacaagaatttaaggacatgtgtgcagccgcggaaaaatatggcgtaaaagtcattgttgatgcggttatcaatcataccaccagcgattacgccgcgatttctgacgagattaagcgtattccaaactggacccatggaaacacacaaattaaaaattggtcggacaggtgggacgtcactcaaaattcattgcttgggctgtatgattggaatacacagaatactgaggtgcaaacctatctgaaacgtttcttggaaagagcattgaatgacggagcggacgggttccgctatgatgccgccaagcatatagagcttccggatgatgggaattacggcagccgattttggccgaatatcacaaatacatcggcggagttccaatacggagaaatcctgcaagacagcgcgtccagagatactgcttatgcgaattatatgaatgtgacggcttctaactatgggcattccatcagatccgctttaaagaaccgtaatctgagtgtgtcgaatatctcccattatgcatctgacgtgtctgcggacaagttggtcacatgggtggaatcacatgatacgtatgccaatgatgaggaagagtccacatggatgagtgatgacgatatccgtttaggctgggcagtgattggttcccgctcaggaagcacgcctcttttcttttccagacctgagggcggaggaaatggggtgcgatttcccggaaaaagtcaaataggagatcgcgggagcgccttatttaaagatcaggcgatcactgcggtcaatcaatttcacaatgtaatggccgggcagcctgaggaactctcgaatccgaatgggaacaatcaaatatttatgaatcagcgcggctcaaaaggcgttgtgctggctaatgcgggatcgtcttctgtcaccgtcaatacttcaacgaaattgcctgacggcaggtatgataatagggccggcgccggttcatttcaagtagcgaacggcaaactgacaggtacgatcaatgccagatccgcggctgttctttattctgatgatattggaaatgcgcctcatgtctttcttgagaattaccaaacgggggcagtccattctttcaatgatcagctgacggtcaccctgcgtgcaaatgcgaaaacagcaaaagccgtttaccaaatcaataatgggcagcagacagcatttaaggatggagaccgattaacgatcgggaaaggagatccaatcggcacgacatacaacatcaggttaaccggaacgaacggcgagggtgcagagagaactcaagaatacacgtttgtcaaaaaagaccaggcccaaaccaacatcattggctatcaaaatccggatcattggggccaggtaaatgcttatatttacaaacatgatggaggcagggccatagaattaaccggatcgtggccggggaaagcaatgactaagaatgcaaatggaatttacacgctgacgctgcctgcgaatgcggatacggccaatgccaaagtgatttttaacaatggcagcgcccaagtgcccgggcagaaccagcccggatttgattatgtgcagaatggtttgtataacaactccggtttaaacggttatcttccgcattaatggatagggctatcatcacatcagcgtgccggcaaaccctcgcttctgggaaaaggacagcacgtcttcaatcacgctgaaaagatacaacatcctaaaacggttccgttttaggatgttgtcaacaatctggaaaccatcatcgatattttttgtccaaaaatcaaacttttctcttgcaaaagtttgtgaagtgttgcacaatataaatgtgaaatacttcacaagttaaaaacagacaccacgaaacactggaggatgagcatacatgatgaacgaacgagtgaacaaagtagcattaatcggagcaggttttgttggaagcagttatgcatttgcgttaattaaccaagggatcacagatgagcttgtgatcattgatgtaaatagagaaaaagccatgggcgatgtcatggatttaaatcacggaaaggcatttgcacctcatccggtgaaaacgtcttacggaacatatgaagattgcaaggatgccgatatcgtatgcatctgtgccggagccaatcaaaaaccgggcgaaacgagacttgagctggtcgaaaaaaatctcgccatttttaaaagcattgtcggtgaagtaatggcaagcggatttgacggcatcttcctcgttgccacaaacccggtcgacattctcacttatgcgacatggacattcagcggtctgccgaaagaacgcgtcatcggcagcggcacgacactggattctgcgcgattccgttatatgctgagtgaatatttcggcgccgctccgcaaaacgtacacgcccacattatcggcgagcacggcgataccgagcttcctgtatggagtcacgccaatatcggcggagtgccggtgcagcaattgctggagaaaaatgcagcttacaaacaggacgagctggatcagatcgtggacgatgtgaaaaacgccgcctaccatattatcgagaaaaaaggcgcgacatattacggagtggcgatgagcctcgcccgcatcacaaaagcgattttgcgtaatgaaaacagtattttaaccgtcagcacatatctggacgggcaatacggtgtaaacgacgtctttatcggcattccggctgtcgtcaatcggaacggcatcgccggtgtgacggaacttgagctgaatgaaacagaacagcgtcaattcaaccatagcgcaaacgtgctgaaagacattctcgctccgcatttcgcggagtaaacaaaaaagcagtacatgacaaacgccatgtactgctttttttaattcgcttttttcgccatttcctgagaggtttttactctcgcttttcccataaacaaaatggtaacggccgcaatgacgatcggcgccagcgcaagcgtgaatacatatgtgatgctttgcgacatggcgtcaataatgcgatccagaatgtgcggcggaatatgggcgcgcgtgccggcctggaaaatctcctgcggatttccgatgttctgcatcgcgccgcccgctcctttcatgccgctgaatgaatctgtgagcttgttggtaaacacattcgtctggatggtcccgaaaatcgtcacaccgagcgtcataccgaatgatctcaaaaacgagtttgttgagttggcgcttccgcggtaacgcggctccagatcgttcatggacgcagccggcagcagtgagaagttgaagccgacgccgaatcctgagatcagcatgaataccgtcagcatcgtacgcgccgtatccggagtcatattggaaagcagcagcattccgataaagaaagcgaccacggaaatcagcatcaaattacggaaccgcactttcgtctggaaaattccgccgatcatacttccgataacagaaccgatcatcatcggtgtcaaaataaagcccgcgctcgtcgcggtgctgccgtacacagcctgaacgaaaatcgggataaataccgctaaaatcacaaatgtggctccgtaaaggaacgccagaatctgtgccgtggcaaataaacggtttttaaacatccaaaatgagataatcggttcttccgcttttctttccacgataaaaaaggcgataaagaacacggcgaacacagcgaacagaccgatgatctgaacggagttccaatcatacgtttttccgccgagctcaagagcgaacatcagaccgacaatggaaaccaccagcgtaatcgcgccggcccagtcgattttctgcttcttgtgttcaagggattctttataataacgaagaatgaaaaacaatgataaaataccgatcggcacgttgatataaaacacccagtgccagctgatggagtcggtaatgagcgcgcctaaaagcggcccgagaacgctggaaaggccgaaaacggcaccgaacatgcccgacatttttccgcgtttttccggcggaaataaatcaaaaatgatcgtgaaggcgatcggcatcagcgcacctccgccgattccctgaatgacgcggtaaataatgagctgatccattgtttgagcgattccgcataatgcagatccgattaagaaaagaataagaccgaataaaaagaaacgcttgcgtccgtacatatcggacagttttccgtaaatcggcataccggccataacggctaccatgtatgatgccgtcacccacgcgaacttatcgaaacttccgaggtccgccacgatatttcccatcgcagtggcaacgattgtattatccatagccgacattaaaatgcccagcaaaagaccgatgacgacaaacttcgtcgaggcgtccttcgcggctgtttgttccatgctttttcctcccatacttacttttgatcattaaatttgctatgatcatattagatttgccgaaaattatcttgatcgtcaagataaattgattttatagggaggcctgtcagttgtcaacaagaaataccagaagcgagacggaggaaaccgccatacagttattccggaagatggccacaaggacgatcctgtttcatcaggcggccgctcaatctctcggtctgtttccgaccgatttgaaatcagctgatatcttaaatgaagcaggcccgatgaccgcaggcgagctcgggaaaaaaaccggcctcagcacaggttcggtaacggcgctcattgaccggctcgaaaaagcgggatatgtcatgaggaaaaaagaccccgaagacaaacggcgggtgatcatcgtgccgctgacagccggaaaagcgaatgtgaagcaattattcagctccttatcccagtccacgatcagcctttgccggcaatataaagaagaagaactgcggctgatattcgattttttaggaaaagcgacggacatgatggaagacgagcttgagaaattaaaataatgtatcatagcacggcccattcatgaataacttgtacaagttgcatgaatgagggggaagccaatgaacatctttttaagctacatcgttctcgggctgtcattgtcagcacctgtcggcccggtcaatgcggcgcaaattgacaaaggcatcaaaaacggcttttggcatgcatggattttcggtctcggcgccatggccgcggacgggctgtatatgattttgatctatttcgggctgtctcaatttttgaccgctccttttgtaaaaacgtttttgtggctcttcggttttttcgtgctgacctacacgggagtcgaaacgttaaaaaatataagggaagccatgaatgtcagaagcggaaaaggaaaaccggctttttacaaaactttcggcgcggggttttttatttctctttccaatccgctgagcattttattctggctcggcatatacgggagcattctcgccaaaaccgctgaatccttcgatgcaaatcagcttttgatttacagctccggcattcttctcggcattttgatctgggatttctgcatggcggtcgctgcgagcactttcagaaatcttcttcatgaaacagcgcttcgctggctgacgggagcggcgggtgtgtctttgatcgttttcggattttatttcggctggcaggggattcaaatgctcatctcataaatagaaggactgtcacctatcgcctgtctccatcataacgtatcctgacgatactggaggtgggccgatggcaagcgggctgtacacaaaaagttgccttgaggaaaagttattggatctgccaaattggcagagaatcgcttttgagcttctatcagaaaaagtaggcgataaagcggatacgtttccgtgcattcccggacgtcagggatttttgacagatcagctccggatatcctttgcgggtgatccccgcgaagagggaaccccggaggaagtggggatgctgctgtccgagtacggaaagatctcaaggaataccggaaaatacgcgtcgctgcttgtgatttttgatacgcctgaggatttagctgagcattattccgttgaggcgtatgaagagctgttctggtcttttttaaaccggctgagcggctgcgacccgaaagactggccggaagacataccggaagaccctgaacattataaatgggagttctgctttgacggcgagccgtattttattctgtgcgcgacgcctgcgcatgaagcgagacaaagcagaagcttcccgttttttatgctggcgtttcagccgagatgggtttttgaaggattaaatgattcaaccgcgttcggacgaaacatgagccggctgatcagaaaacgcttagaggcgtatgatgaagcccctcttcatccccgattggggtggtacggaggaaaagacaatttagaatggaagcaatatttcctccgtgatgatgagacccaagtgtcaaagtgtcccttttcttatttgaagagactgtttaaaccgacgaaataagctatgatccggcagggctgtgtccctgctttttttgtacgatccatgtcacgatcgcaatgacggcgagaaaacaaaggctgaccagaaaaccgggccggctcgatttctcaaacagcgtcccggagacggccgcgacaatcagcacaagggcgataacaatctgtacggttcccatctttgtcgtttcaagcagtttcttgcccgagaacaaaatgaacagccacgtataaagaagcatgaggcccgccgcggttgtcatgtgttcatatatgtttttcggcagcaccaatgacaggatgatggagacgatgagtccggcaaacgtcaatccgagcgcgggccagcagatttttttgttttcctttaatctgaagcatttcggcgcatctccgtcatcagccattgtacaaagcaatgtcgtcaccgcaaacagcgaggcgacgagcgtggaaaatcccgcaataataaaaatcccgttaaaaatatcaagaatgatatctaaatgaaaacccttcagcgatgtaataaacgggctgtcctgttcggtgaatttgcccagcggcactaacagcagcgccaggccgagagaaatgacgtaaatcaccgcaagaacggcaagcatcagccggcctgattttgaggcttcctccggctttttcaaatgcacggtcatcagccccaagacttcaattcctccgaaggcgtaaaacgcataaatcaatcccgtccataaccccatcgctccgtgcgggaacaaatcctttgattcgttcggcacctgcacatccggtttatgagaaaatataccgcacagcgccaatatggcgatgacgataaacataacaatcgccgccgtcttgacaacagcgagcacattttccgttttttgaaaaacggacagccccgtaaatataatcaaaagaccgagcaccgcatagatggaggcgaaaatccacagcggcacattcggaaaccaatgcttcgtaaacagcgagatcgctgtcagctggcttcccgtgatcagcatctcggacgaccagtacacccatccgttgctgaaaccggcccaagtgccgaaagcctttctcgcataagcgcaaaaagaccccttttcgggctgtttggccgagagcttcgcgagctgctcaaagacaaaataggtgccaagcccggcaataagaaatgagatcagcgcggaatatccgcttttgacaatagcgatgctggacccgagaaaaaagcccgtcccgattgtgcagccgacaccgattaaggagagctgccaccaagcgagattccctttaggctggtcctgtgatttactcatgaagttcaacccctttatcaaagcttagattgcggccgtcagaaggggaatatacatccaataaattgctttacatgaaacaaacggccggggttcataatagaagaaaaaaaggagcagtctgatgacacagcaatttatcgtaccgccgaaaaaagggctcggcctgaaggttcacaaagggcagattataaaagtagtcgatgtggaagggcagcaggtggctgattttacggcgtatcatgccaaggacttttatgaacatcttgatcagggcgcgacgatcgatgccaaccagtccattcatgtaaaaacaggtgatcatatttattcaaatttatacaagccgatgctgacgctgattgaggatacagtcggcaagcacgacttgctgcttcccgcctgccgtccggatatgaacaggcttttatacggaaagcataaggacgagctccaggatacgtgctatgacaatatgagcggggcgcttgaaccgttcggggtgccgcggccgcatatgcattacccatttgccatctttatgaacacggtgctcgatgagaaggggaacttatcagtcgaaacccctctttctgacgcgggtgattatgtacggctccgtgcggaaatggatctcgtcgtcgcgttttcatcctgtccgatcgaaaaagggaaatgcaacggggacagcatcacggcgctgcgggtggaaatcagctgatcccggtgtatttggttcacttaaaaactgcacctgtgctatatttaacaaagagtcgtacatagtggcatgattcattttcagtatgaacgggaaatgaatcataaagaaacaatgcaggaggagtgattgggatgagcatccagaaacaaattatgaatgatcttcatgtaaaaccctcaattgatccgaaacaagaaattgaggacagagtgaactttctgaaacaatatttgaaaaaaacaggtgccaaaggctttgttctcggcatcagcggggggcaggattccacgcttgcgggacgcctcgcccaattggcggctgaaagcatcagagaagaaggcggaaacgctgaatttatcgccgtccgccttccgcacggcacacagcaagatgaggatgacgcccaattggcgctcaaattcattaaacctgataaatcatggacatttgatattaagtccgctgtcagcgcgttcgctgatcagtataaaaaagacacgggcgatcagctgtctgactttaacaaaggaaatgtaaaagccagaatgagaatgatcgctcaatatgccatcggcggacaagaggggctgcttgtcatcggaaccgaccatgcggccgaggcggtgaccggtttcttcacgaaatacggtgacggcggagctgatctgctgccgctgaccggattaacgaaacgccagggcagacgtttattagaagaactcggcgcgccggaacgcctgtatttgaaattaccgacggccgatctgctcgatgaaaaaccgcagcagacggatgagaccgagctcggcatcacatacaatgacattgatgattatttagaaggcaaggatgtttcttccgaagtgattgaagcgctggaaaaacgctacctcagtacggagcacaagcgccaggtgccggcatcgatgtttgatgattggtggaaatagaatgaaaaaaacctcccttttgaaagggaggttttttgtttatttcatttttatttatctacactttcataaatccctacccaataccctttgctgctgtcatagtatttgtatttaaaaatccatgttgtaccattcagttcgaaagaagcagcgaaaataccgttagggcttggaacgggcttgatggcattaatgccggcatctgctttcgttgagattgggctattttccacggatggggatgctgttggtgatgcggcaaaggcaggagcggcagacatcagtaaggcaagagacagcgcagaaccggttaacacttttttgaatttcatttcgaacactcccttttcaaatgaaatgtattacagtgttaataattagacgattatccatataattcctcctttatttctaaaatttttttcttaaattgaaaaaaacatcccttcggagggactttttatttattgatccatttgcatgggtcagggacatgttttcaaaacgcttttttatttgatacggatatgattcagcttcaccattaatttgtcggtaaatcttcgaaggctgcctctcgaatcaggctcaagaggcagatttgcttgggcagcgatcgtttctgcggcctgctgaatagacatttggtctgtatggagatgttctgcgaagaggctatcagacaggctgttgatacagcggtcgatttgttttgcggcccaggagttttttccttccgctctggtgcgcaggcgtttcagcaatgtttcctttgaagccagcagggtaaagtggtgaatggtccggccatcctgtctcagcctgctgataatgtcatggaagtattgatcgttcgtaatggtcatgggcacaatgatgatgccctgatatgtatctgacaaataggaaagcatgctgtaattgaattcccgccacagagggtagctttgaaagtcatcttcagcgatatccggcggtatcatcgaacgcatcgcaaaccccatcttttcaggatcatatacgtaagacggtttcagtcttctgtgcagttcaaacgctgtttgtgtttttccggaaccgaaagccccatttatccaaatgatcatcatgatatccccctttttctatatgatacaaaaaaaagacccttcgatcgaagagtcagcgggaaaaaacagacgtatattcccggagcgattcctttatatgcgtaaaggcatgttctccaaaatactcaagagaaacaaaaccgtcatattgtctgttcatcagctcttttaaaaatgctttttgatcgagatctccttggaaaatcggagttggcttgctgagataccagttgtcaaaattccagtgatagtttttcagatgaatatggctgacggtatgatacagcttttctaaagcggacatttggtcaacgtgattgacgtgtaggttggagccgtcaaaaatggtgcggacccgcggatgtccgacatcctccaaaaatgccagtgccgcctccggtgtatccgcgtacgtatcgtaatgaatctcaagcccgatatcgacttcatagtcatctgcgagccgtgccgcctgctgaaattgatcaaccgcacgttgccacttttccggtgacgtccgatgcgaaggaagattgccggcaaagactctgatcaaggggctgtgcagctgtcgtgccgcgcttaatgccccttgaacatcctttaacgcctgcctttcatcctgagcggcgaagtcagtgtacaaactgacggcaggcaccccgaggccttcctcctgaagctgctgatcaagcctgtcgagcgggccgatttcctctatatattgtttagcgtgtccgtaccacagttcgattccgtcaaaggagtgctccttcgcgaaagaaatgatgtcgaaaatatgcttttttttaaatcctgtcgtgcaaaaactcagtttcatcggtaatcctcccgtaactgtctatcatatgtgtacttttccccgggtgagatacggataaacaggtgaaaagggcagacacttttataagcggagtgtcagtgcggcgcacaaattgtttagcgcttttttgcgtcaaagtattaaataattgaccgaagtgttgtacaattaatttcattcgagtaaggggggagaagccattgaaaaatgaaacggagctgacggacttcagtcccgtccgcaataaaccgactcgcgctcgttatgtgatactgtttcttttgttttttatcactgcgattaattatatagaccgtgccagtgtatccatcgccgccccgtccattcagacatcgctgaacataagccccgcgcttttgggcgtcgtcttttccgcattcagctggacctatacgggtatgcagattcccggcgggctcattttggacaaattcgggtcaaaacggacgtacggcgtttctttaatgatctggtctgttttcaccggagtgcaggcttttgcagccagtttcggatttttattcggctgccgcctgattatcgggctggctgaatcgcctgcgtttccggcaaacaatcggattgtcacgacatggtttccaaggcgggaacgcgcctttgccacgggtgtttatacggcgggggaatatgtgggactggcgttcgccacaccggttttattctgggtgttaacggcatttgactggcgcgccgtctttatttcctcaggggtgctcgggcttgttttctccgttttctggttcaaaatgtatcacgagccgaatcggtaccggaaagtgaaccgggaagagcttgattatattagagaaggcggcggactgacagaggtgtctgaatcagccggcaggatcacgtggcgggatttcgtccagcttcttaaataccgcaagcttgtcggcttgtatatcggccaattcgccgtagcctccacgctgttcttctttttgacatggtttccgacttatctggcggaggcaaagcacatggcattcttaaaagtcggcttcgccgcatcaatcccgtatatcgccgcctttttcggcgtattgttcggcggatattggtctgacggaatgatgaaacggggcgtgtcggtgaacgttgcccggaaaacccccgtcatcctcggtcttctgctgacaggctccatcgtgctcgcgaatgttacggattctgctcctgcggttttgacgatcttatccattgcttcttttgcgcagggcatgtccaatatatcctggacgatgctgagtgaggtggcgccaagcgaaacaatcggattggcaggaggcgtgtttaactttttcgccaatatggccggcattatcaccccgcttatcatcgggtttatcgtttctgcgaccggttcatataacggagcgattctgtttgtcggcgctgtcgcatttatcggggcattttcttatattttcattgtcggaaaggtggaacgcattacgctccgatagaaagaaaaactcatctcttcttataaaggatgggttttcttttattgcattatctctatatttcaatattgggttatcatataataaacataactttttcatttcttaggaggatttcgccgaagatgaacgcaaaacgtgccattcccgtaagagaaagaaacatcgtactgatcggattcatgggtgtcggaaagacaacaatcggccagctggtcgctaagaaattatacagagacttcattgatattgatttgcagattgagaaagatttcaatatgtccatccctgaaatgtttgagaaaaaaggtgaagcctttttccgtcaaactgaaaaggactatatattagatatctgccgcaatacgaaattcaagatcgtgtcgcttgggggcggttcgtttaaacaagaggcaatcagacagtgctgcctcgaaaactgtctcgtgctccatcttgatttatcatgggagaattggaagcagcgggctgacctgctgattgaaagccgtcccgttctgcataaccgttccatggatgaaatgcagcagctctttaacgagcgccaaagcatctatgataaacataattcaaaagtggcgacggataatctggaaccagaagaaatcgccgattatatcgtagaaacgttaaaaatcggctgggatctgtatcagccgatgtaaaaagagccgtgacgctgtgagcgtacggcttttttgttttcttttaaacaaacgtttattaaaatgtttagaaaatgagtgtaaaatcgtgttaagatagagtcagaaaattaaatcttataaaacaaaggagaataatcggatatgcaattatacgacttgccgctcgaccaactgcaaacctataaaccaaataaaaccgctcctcatgacttttcggatttttgggcatcatcattacatgagcttgcaaaggaagaggcaaagcctgaattgacggctgaaagctacccggctgacggcgtgaaagtattccggctgacataccgaagcttcggcaaggcggaaattgagggatggtacgccgttcccgaccggcaaggaccgcatccggccatcgtgaaatatcacggctacaacgcgagttatgacggagatatacatgacatcgtaaattgggcgcttcacggatatgccgcgttcggcatgcttgtccgcggccagcacagcagcacagatacaagcgtctcaccgcacggacacgttcccggctggatgacgaaagggattttagataaagatacatattattaccgcggcgtgtacttagacgccgtccgggctttggaagtcatcagcggctttgatgaagtggatgagacgagaatcgccgtcatcggggggagccagggaggcggactttcaatcgccgcggcggcactatctgacattccgagagcggttgcggccgattatccttatttaagcaattttgagcgggccattgatgtcgctcttgatgagccgtatcttgagattaactcttttttcagaaagaacggcagccctgagacggagaaggccgcgatgaatacactggcctattttgatatcatgaatctggcggaccgcgtaaaagttccggtgctcatgtctatcgggctgattgaccgcgtgactccgccgtcgacggtgtttgccgcttacaatcatctggaaacggaaaaagaattgaaggtttaccggtatttcggacatgaatacataccttctttccataaggaaaagctggcctttctgaaagcgcatctgaaaggctgacgacagcgaaaagcccaagtacttgggcttttttcaggaatgatcacggaaaaggacggatacagatggaacaaaggatcatcgaagaattaaaacgaattgaagcacagcacggcgtcaaggtgctttacgccgtagaatcagggagccgcgcatggggatttccgtcaagcgacagcgactacgatgtgcggtttctctatgtgccgaaaaaagaatggtacttttcgatcgaaccgcatagggatgtcatagaagagccgattcatgacatgcttgacatcagcggctgggaactgagaaaagcgctgcggctttttaaaaaatcaaatccgcctcttttggaatggctctcttctgagatgatctattatgaagctttctcagcggctgaaaagcttcgaaaactgaaaatccgcgccttttcgcctgaagccggcatttatcattatctcaatatggcaaaacggaatgaaaaaacggaattgcagggcagtgaagtgaagattaaaaagtatttttatgttttgcgtcctctccttgcctgcagatggattgaaacgttcggctccgtaccgccgatgtcatttcccgtactggccgatgccttattgacggatgaagcgctcatttctgaaatcaatacactgcttacaaggaaaaaaagcggtcaggagctggctccggaaccgagaaatatgatcattcacgcgtttatagaagaagaaatagaacgcatcgggcactatgtcaaaacgatcaaaacaccgaaacctgacataacggaggaactgaatcagctattgattcagaccgtcgaagaggcgtggggggaaaaaggcggaaattgacgattgccgtcatttccgtccgccttttttcggcataatccgcctgctatctaagaagctgattgtggtaaaaccacaaaaatttatcagaatctttgtatttttagaatattgtgagaggatgttttgtccatttacaatagactcatacaaatacttcttagattgcggggtgttaaggttggaagtgattacaagagattttttcttatttttatccaagagcagctttctcaataagatggcgcgaagctggggaagccgtgtggcagccggcaaaatcatcggaggaatggatttccgcagttctatcccgacaatccgacatttgaacagccaggggctgtcagttactgtcgatcatttgggggaatttgtcaacaacggtgacgttgcgaaagaacgcaccgaggagtgcatgcagaccatcgccttaattgctgatgaacagctgaattcccaagtgtcattaaaaatgacgtctttaggtcttgatatagatcttgatctcgtctatgaaaatatgacgaaaatcctccagacggctgaaaaacataaagtcatggtgacgattgacatggaagatgaaacgagatgccagaaaacgctggatatctttaaagacttccggagccggtatgaatatgtaagcaccgtggtgcaggcttatctgtacagaacggagaaggatcttgatgacctcagcccgctgaatccgtttctgcggcttgtcaaaggggcctataaagaatcggaaaaggtggcctatcctgaaaaaagcgacgtcgatgaaaattataaaagactcatccgcaaacagcttttaaaaggacattatacggcagttgccacgcatgatgacaaaatgatcgagtttacaaaacagcttgccgaagagcacggcattccaaacgaccgttttgagtttcagatgctgtacggcatgcgctcgcaaacccagctcagcctggtggaagaaggataccgtatgagagtctacctgccttacggggatgactggtacggctatttcatgagacggctcgccgagcgcccctcaaacatcgcattcgcctttaaaggaatgactaagaagtaaaaaagggagagatgacaatgactacaccttataaacacgaaccattcacgaatttccaagatcaatcgaacgttgaagaatttaagaaagcgcttgcgacggtaaatgagtatctgggaaaagattatccgctcgtcatcaacggtgaaaaggtagagacggaagcgaaaatcgtatccattaaccctgcagacaaagaagaagtcgtcggaaaagtgtcaaaggcgtcccaggagcacgctgagcaggcgattgaagcggctgcgaaagcgttcgaagagtggagatacacatcccctgaagaaagagctgccgttttgttccgcgcggctgccaaagtccgccgcagaaagcacgaattctccgccctgctcgtcaaggaagccggaaagccttggaatgaagctgatgcggatacggcggaagccatcgactttatggaatactacgcgcgccagatggttgaattggcaaaaggcaagccggtcaacagccgcgaaggcgagaagaaccaatatgtctacacaccgaccggcgtaacggtcgtcattccgccatggaacttcctctttgcgattatggcgggaacgacggtggcaccgatcgtaacgggcaacacggtcgttcttaaaccggcaagcgcgacaccggtcatcgcggcgaagttcgtagaagtgcttgaggaatcaggtcttccgaagggcgttgtcaactttgtgccgggaagcggagcggaagtgggagactatctcgtcgatcacccgaaaacaagcatcattacgtttacgggatcacgtgaagtcggtacgagaattttcgaacgcgcggcgaaagtgcagccgggccagcagcacttaaagcgtgttatcgctgaaatgggcggtaaagatacggttgttgtcgatgaggacgcggacattgaattggcggctcaatccatctttacatcagcattcggcttcgctggacaaaaatgttctgcaggttcacgtgcagttgtccatgaaaaagtgtatgatcaagtattagagcgcgtcatcgaaatcactgaatcaaaagtgacggcaagccctgacagcgctgacgtgtatatgggacctgtcatcgaccaaggttcttacgacaagatcatgagctacattgaaatcggaaaagaagaaggccgtttagtaagcggcggcaccggagatgattcaaaaggctactttatcaagccgacgatcttcgctgaccttgatccgaaagccagactcatgcaggaagaaattttcgggccggtcgtggcgttttctaaagtatcaaactttgatgaagcactggaagtggccaacaatactgaatacggtttgacaggcgcggtcattacaaataaccgcaaacatattgaacgggcgaaacaggaattccatgtcggcaacctgtacttcaaccgcaattgtacgggagcgattgtcggctaccatccgttcggaggcttcaaaatgtccggcactgattcaaaagcgggcggcccggattatttggcccttcacatgcaggcgaaaacaatcagtgaaatgttttaagagggactgaatgggcatcctcctcgcggggggtgtccatttcaccataaacatataaagcggaggaggaaatgccatagcaaacattcagttgattatttccatttgtatttatatggcgggcatgctgtttatcggttattttgcctacagacggacgtcaaatctgacggattacatgctcggggggcgttctttaggccctgccgtcacagcgctcagcgcgggggcggcggatatgagcggatggctcttgatggggcttccgggcgccatgttctcaacgggattaagcggcgcttggattgtgatcggacttgtgctcggggcgtgggcgaactggcttttcgtcgcgccgagactgagaacgtataccgaaaaagcggggaattccatcaccattccgggtttccttgaaaaccgtttcggtgatcatacgaagcttctcagactgttttcgggtctcgtcattctcgtctttttcactttttacgtatcatccggcatggtgtccggaggtgtcttattcaacagcattttagggttgaattaccacacgggactgtgggtcgtgacaggcgtcgttgtcgcctacaccttgttcgggggctttttggcggtaagctggacggactttgttcaagggatcattatgtttgcggcgcttattcttgtgccgattgtgacgattttccatacgggcggcccgggggaaaccgttgccgatatccgttccgtcaacccggaactgtttaatatgttcaaagggacgaccgtcctcggcattatttctttatttgcgtgggggctcggctatttcgggcagccgcatattattgtgcgttttatggcgatcacatctgtgaaagagatcaaacgcgccagacggatcggaatgggatggatgattttgtctgcactcggcgcgctgtttacgggtcttgcgggaatcgcgtattaccaccagcgcgggttgaagctggctgatccggaaaccatttttattcagctcggcaacattctgttccacccgattattacgggatttctcatttctgcgattttagcggccattatgagtacgatttcgtctcagctgctcgttacgtccagttctttagtagaggatttgtataagtccatgttcaggcgttcagcttctgataaggaactcgtatttctggggagaatggcagtgcttgcggtgtcaatcatcgctttggtgctcgcctgggagaaaaacaacacgatacttggtcttgtcagctatgcatgggcgggattcggcgcttcattcgggccggtcgtactgctcagtttattttggaaacggatgacgaaatggggggcactcgccggcatgattgcgggagcgattaccgtaatcatttgggcgaatgccagtctttcagactttttgtacgaaatcattccgggctttgctgtaagccttgccgctgtatttgttgtcagcttattgacacaggctccgtcaaaagatgtcacagatcagtttcatgactaccgtgatacactttctcaataaaagcaaggaacgagaggaagaagggaccgccctttttcctcttttcacgatacaggctttcggatcattccgttttgggagtatatgaatttttttctatacaaaaagtcacccctcagagtatgataaagataaaaagagcataggagaaataggtatggaagagcttttagagagagttttttcatttacggacattgataaattaattgatttcatcagttatgaattgcagaagcccgttattctggaaagcgcggatttctttttgcttgcctataattcttattacattaatcacttcgactccgccaaccagcagacgatattctcaaaaaaatgccccgtgcagatttttgaaaggtttctgaaggacggggtgatcgaaaagctgaaaaccgttcctgaaccgttccgtgtcgaaaaaatagacagtatcggattgaatcagagagtggttgtaagcgcaaaacataaaggggaagtgatgggctacatctggattcaggagctcgaccgaaacttgacggacgaggagctcgattttttatatgaaacttcattccatgtcggaaaaatcatctacaaaacgaaccggctgaaacaggaaaaagaagagagagcggaagacctggtgaaacgggcgatctttcagcaattctcctctgaaaaggagttcaggcgggaagcggaaaagatgaacgccgtgctgccgtcggttttttcggtagtcgtcctgcacgccgcaaatggggatggggaggcagtcgaagatgtaaaggaaaatatcaaatcgtacttgaatttgcgggataaagtcagccacgtcttaaccattgattccaatattgtcatcgtcgtcgcaagcttctcgcaaaaaagctccggcacttcggcagcatctgaattcatccacaaactgctgactcattttcactttcagaagatccccactcccatctatatcggaatcggcaatgaatacagcagcatcctgaagctcggcaaaagttatatagaagcccttgaagttataaaggccgccgaaattaccggaaaccaggaaaatatcccgtacgaatacagtaagctcgggatttaccgctatcttgaaagcatcgaagaaaaaaacgcctcactggaatatgtaaacgatgatttagcgttattaaaagccaaagacagagaaagcagcaccgaactgctgaaaacgttagaaatctatctcctcaataactgcaaaacaaaaccagccgcagaacagctttttattcatcaaaacacattgaactaccgcatcaaacagattcttgacatgacatcaattaatttaaacgacttcaggacaaggtgccagctgtatctcgatatcatgctgatgaaaaagagataaaaaagaaaccagtcgccgtactggtttcagttttaataccttcccgcttatcaatctcagaacctcacttctgaatcactcctttcccgcaagatgagaaatgaataaacactgctcctcaatatatgttatactttcattgatattgattctcaattaaaaaagtatgaagtatagatataaacgggaggcagaacgatggcggaaaatcatgaggtgtacgacgtcacgattataggcggaggcccgatcggcctgtttgcggctttttattgcgggatgcgggagctgaaaacgaaagtgatcgagtttttgccgcggctcgggggaaaggtgtctatgttttttcctgaaaaaatcatccgtgatatcggcggaatacccgggattgccggggaacagctgattaagcagctgaaggagcaggcggcgacatttgagccggatatcgtgttgaatcagcgggtggccggatttgaacggctggaagacggaaccattgtgctcgaaagttccgaaggggaaaagcactatacgcgcacggtgattttggccgtcggcatggggacgcttgaggtcaatgaacttgacagcgcggatgcgagccgttattcaggaaagaaccttcattataaggtggagaagcttgatgcgtttcgagataagcatgtcgtgatttccggagggggagataccgcggttgactgggcgaatgagctggaaccgattgcggcgtctgttaccgtcttgcaccgccgtgaggagtttggcggtttggaaagcagcgtggcgaaaatgaagcggtcttccgtgcgggtgcttgcgccgtatcgtctgaagcatctcaacggcaccggggaacggatcgagagcgtcaccgtttgccaaactgagtccggactttctgaagtcatcaagcttgatgagctcattatcaaccacgggtttaaaattgatctcggtccgatgaaggactgggggcttgagatagaagaaggcaggattaaagctgacaggcatatgcgcacgaatcttccgggcgtgtttgtcgccggtgacgccgcccattatgaaagcaagctcagactgattgccggcggtttcacggaggggccgaccgcagtgaacagcgccaaagcctatttggacccgcatgcggatcagatggcgatgtattcgactcatcataaaaaattggtgacacaataaaaaagggctgccccccgatgctgggtccgggggtcagaaaagcattccggcgtatcagctgtgaacgagcatgtctttcatttcatttcgtataaacgcaaataactgttcctgatttttcacggcggtaaacccgcagccggcggggaggtcttcgcccatgcagatgacgggagggcggtttcctctcgggttcggtgatatgccgatttgttttccggcgctgatcaaatgctgagcggattctttgcccgtacagataatcatttgcagaggtgactcactgatcgtgcgttcgatcatggaagtgaatcgctcatccgcgatatgttcatgggtgatataaaacaggcatgattttgagtctggcaagttttctgctgcttgacggctccctacaatgagagaatgcggagaatcattttgccattcggataggagaaagccccgttttgtcagttccgtctttgcggcttcagtcgctgcattcaggcttgcggtcacccggcggatgtcgatctgcttgaaagccagtgtgtcaaagaattcgcataccgcaaggcgtgatgtgaaaaatagttgttcaaaggtgctgatctgtttcaggatgttttcgtttgcgggcatttttttaacgatccgcttcggccattcaataacatcggcgccatactcgcgcagcttgtctgtcaatgtatgttcatcatccccatgagtgaccaccatgatatgccgtccgatgaacggtttgctttcaaaccagctgtgtgtttgaaaattgacaatatcaccgatgacgataatggcagggttggtgatgttttggctttgaactttttcatggatatcctgaagcgttcctttaacgctccgctgccgtccccacgtcccccattgaatgacgagtacgggaacggaaggggattttccgtactccataagcttcctgcatataaatgacagatttttaacgcccatgtaaaacacaagcgtttgaacgcttcgggcaagcccttcccagtcgagattcggcctgccgtgcaatgatgtatcatgagcggtgatcatcgcgaaggacgaagcgaaatcacgatgggtgacggggactcccgcatacagcggcgctgcaattcccgaggtgatgccgggcaccatttcgtagcggatgccgtgctgatgaagcgcctctgcctcttcgccgaccctgccgaacacacttgggtctccgcctttcaagcggacgacggtgtagccctccgccgctttttctatcagcagggcatttatctcagactgtttcataaaatggcggtcgggcagctttccgcaataaatgaaccggcagtccggtgaggcgtattctagaaactttgggtttgcgagccggtcatacaaaatgatatccgctttctccagagcctgttttccttttacggtgatcagccccgggtctcctggtccggcaccgacaaagtatacgattccgtttttcatgatggcgtcatcccttcagcaatttaaaaaatgaaggaccacttggaaaagtgatccggtctttgatcaatacaggaggtatacattctctccttcgatcagtgtttcgtatgttttgacacagccatgatccggctcttggacttttccgtcttctaaggaaattttccagtcatgcatcgggcagaagacgtattctccgctgacgatgccttcagccaggacgccctctttatggggacagcggttttcgacggcgcggacgctcccgtcagaaagcttaaatacggcaagctctttatcttctatatatacggtttttcctaactcctcgggtaattcgtttacattgcctatgcaaacctttgtcatatctttattaaccatgtccgttcccccttactgttttatgaagtcgtgacgacattttcgaatagatctttagaagcttttttatctttaaggaagtattgccacggatctttgtggacagagagtgtctcattcattctgtcgttgagctcctgccgtttttccggatcgtttaatacggattggacatgagataaaccgacgcgctcaagccatgcggatgtccgctccagatagtttgccgtttctctgtagtactgaaggtaagcacccgcgtattctaagacttcttcattcgtttttactttcatcagcaaatcaccggcgcgcaaatgggttccgccgtttccgccgacataaagctcccagcctccgtcgatgccgacaacgccaaggtccttaatgcctgattccgcacagttccgcgggcaggcggacacggccattttaaccttatgaggcgtattgagcccttcgaattttttctcaagcgcaatacccagtgccatggagtcttgtgtgccgaagcggcagaattgttcgcctacgcacgtttttaccgtgcggagtgtttttccgtacgcgtagcctgacggcatatcaagctcggcccatactttcggcagatcttcttttttaacgccgatgagatcaattcgctggccgccggtcattttaacgagcgggatctcatatttgtcgacgacatcggcgatcttgcggagatcttgagagttggttacgcccccgtacatccggggaacgactgagtatgttccgtctttttgaatattggcgtgcatccgttcgttcacaaaacgggatgttctgtcatcctcgtatgtagccggattaatcatgcctaagtagtagttgagggcaggccggcatttggagcagccttccggcgttttccagccgagcacgttcatgatttctctcgtatgtgagagccctttggctttgatttcttctacgacttcatctctcgacagtgaggtgcagccgcaaatcgcttctttttgcgcggatgagtcaaattctgagcccagtgtatattgaagaatgtcttctacgagcggtttacagcctccgcaggaacgggatgccccggtgcatgctttgatttcgtccgttgatgtgcagcctttttcctgaatggcttgaataatggcaccttttgaaacgccgttgcagccgcagatgatttcatcgtcgctcatcgccgcggtcatgcttacgcctgcttcctgatcaagaggctgtaagattgatattttggaggtttcagagatatctgcttctttttgaatcatagaaaacaggcggttgccttcgctgctgtctccgaacaaaacagcgccgacaatttgattgcccctcaggacgatttttttataaatgccgtcctgttcatcgaacacttttattgcctttttgtcctctgattcatcaaagtcgccggcagagaagacctcgacgcctgatacctttaattgagtggagagaacggagccttcgtacggttttgtttcaatgccgcaaatatgtttggccagcacttttgcctgttcatagagcggcgccacaagaccgtacgcgattccgcggtgctcggcacattcaccgaccgcgtaaatgtgcggaatttcagtctgcatataatcgttgacaatgattccgcggtttaccgggatgccgctttctgtgccaagctgtgtattcgggcggatgccgaccgccatgacgaccagatcagcttcgatgcttgtgccgtctttaaagcgtacgccttcgacacggtcagtaccgagaatttcttcggtttgtttttcaaggaaaaatgtcatgccttgtttttctaactcgttttgcagcaggcgtcccgccgctgcgtcaagctggcgctccatcaggaatggggcgaggtggatgacagacacgtccatgccgagattcagcagtccgcgcgcggcttccaaacccagcagtcctccgccgatgacggctgcttttttatattgttttgacgcggcgagcatcgtgtcggtatcttttatgtctcggaatgccgtgacgccttgtttgtctgcgcccggaatcggaaggataaaagggacagagcctgtcgccaggatgagttcatcgtaaggctggattctgtctgcatcggtgatgacggtttggttttccgtgtcgactttgatgactgtttcaccggtatacagctgaatgttgttttctttgtaccagttccaatcgtttaacgtaatgtcttgaatgtcggtatcgccttgcagcacttttgacagaaggattcggttatagttgggatgaggttcggccccgaatattgtaatctcaaattcgtcttttgaaacacgcagtatttcttcaatcgctcttaccccggccattccatttccaacaaggactagctgtttttttcccatcagatgatccgctccttatctttgtttttttcagcgtagcacagcaaaaacaaatatttaagatgcatgttatgaaatgtaacaaaaaatacgaaaaaatctaaaaattttatgaaaattagatagggatgattcgtaccgcacacatcttaaaaccgggcattttacagtccggatccaaggcttcaccaattaaatcgttgacgttttgcgtgtcagaccaatggatggggacaaacaacgtgtgatgtgtctgacttttacttgattttaaacggagaatacatcaaaataaatagtaacgattgcgatttaaaactatgtacatcatgatgaaaataaggcagttgcgagatataaatcgtaatcattctattttatcaggggctattgatatgaaaaaaattccggttacagtattgagcggctatcttggtgccggaaagacgaccgttttgaatcatattttacaaaaccgcaacggtttaaaaattgccgtcatcgtcaatgacatgagcgaagtaaatatagacgcgggcttggtgaagcagggaggcggtttgtcaaggacggatgagaaacttgtagaattatccaacggctgtatctgctgcacgctgcgtgaagatttattagtcgaagttgagaaactcgcgaaagacggcaggtttgattatattgtcattgaatcaacagggatcagcgaaccgattccagttgcccagacattttcttatatagatgaagaaatgggcattgatctgacaacattctgcaggctggacacaatggtgaccgtggtggatgcaaaccgcttctggcatgatttccagtccggtgacagccttcttgaccggaaggaagcggcgggagaagaggatgaacgggagattgccgatttattaattgaccaaattgagttttgtgatgtgctcattttaaataaatgcgacatggtgggcgaaaaagagcttgaacagctggaaacggttcttcgcgcattacagccccgtgccagactgatccggtccgttcgcggagaagtgcccgccgaatgcatattgaataccggtttatttgagtttgaggaagcgagttcatcagcaggatggataaaggaactgacggcaggtcatgaagcgcacactccggaaacggaagagtacggcatcacttcgtttgtgtactcgcggcgtctgccgtttcataccgttcgttttgacagctggctgcatcaatcaatgcctgacaacattgtgcgcgcaaaaggaattgtttggtgcgcaacccgcaacagccttgcgctgctgatgtctcaggcgggtccggcggtttcgattgagcctgtttcttattgggtggcggcaatgccgaaacttgagcaggagcagatcaaaaagcaggaaccggagattctggaagattgggacgaccaattcggagatcgtcatacgaacttggtgtttatcggaacagatttagatgaagccgccattacaaaggaattggatcagtgcctgctcacgcagtctgagttcgattctgattggtcgcagcttgaagatccttttcaatgggatattcagcgggccgaataacataccggccaagtttagaagcaggtgaaaagggaaggagtgatgaaaaaggagctgaccaagtgtgaaagcattgacataccaaggaaaagaacatatggaagtgaaagaagtcccggcacccgccattcaagatgagagagatgtcatcgttcgaatcaccgcaaccgggatatgcggttcagaccttcatttatataaaaacggaatacccgccgatccgggttatattgtcgggcatgagccgatgggaatcgttgaagaaacgggcagtcaagtcaaaaagctgaaaaaaggcgaccgtgtcgtgattccttttaacatcggctgcggagaatgtcattactgcaagcaccagatggaaagccagtgtgatgaatcaaatccaaatcctcatacagatgccggcggtttattcggtttttcggagtttaacggtaattatcccggcgggcaggctgaatatttacgtgttccttttgctgatttctcttcttttctggttccggcagacagtgagcttgaagatgagcaggtgctgcttctgtcagatgtcatgccgaccgccttttggagcgttcagcacagcggagtgaaaaaaggagatacagtcgttattttgggatcaggtccgatcggcttaatggcgcaaaaattcgcgtggaaaaaaggagctaaacgggttatcgcagttgatcaagtcccgcatcgccttgaacatgcgagacgcataaacggagcagagaccttcaatttttcagaacatgatgagatcgggaaactgctgcatgaacaaacgtcagggggcgcggatgtagtgattgattgtgtcggaatggacggcacgccgctttcaaaagaaaaagcagagcaaaaaccgaatcagttcggaacgatcagcccgattcttatagcatcagaagccgttaagaagtttggaaccgtgcagctcacgggcgcatacatttctgaagcggacggctttccgctcggtgatttttttacacgcaacgtttctttaaaaatgggccaggcacccgttattcatctgatgccgatgctgtatcaaatgattgaacaaaatgaaattgatccgacggatatcattacacacaaaatgagtcttgcggaagctcctgctgcatatgatatatttgacaaaaaagaagatggcgacattaaagtgattttgaagccatagcgaggggaaacatgatgaatatttacagaccggcgggattttggatcagattgggagccgttgtactcgactatttaattacttcagtgcctttggcgattatttttatgctggcaacaggaaaagacccgaatgagagcgcaatgatcagcatcattttgactctttatggtattttgctccctgtatactggaacggttatgttatcggcaaaaagatctgcggtatccgcatcgtcaaaaaagacggaaaccaggcaggctttcttactatgattttgagagtgcttgtgggcggcctgatatatggcgtgacgtttggaatcggtgtgatcgtgagcgcattcatggtcggaatgagagaagacaaacggtcaatccacgattttgtagcgggaacgtatgtcacatacgcactgccggacgaatcgattgaaaagagcgaataatttcgctctttttttgcataaaaaatggatgagggagcaacatataacaaacgttaaaggaggaaagagtcatgaaaaaagctgcattgtctttagctgcgtttttcattacagcaatggttttcacaatgccggcacacgccgaaacaaaaatgccttcaacaatgtcactcacggaacagcagaaaaaagaaattgaatcacttgaaaaagaagtgctcgaaaaacgcaaacatgtcatatccaaatatgttgagtacggggtcctgccgaaagaaaaagcagaacatattaaacagcatatggacaggcgctttaatatgatgaaacaaaatggctttgtcccgaagcctccgcctcataaattggaaaagcggcatcatcattcttaagcatccggcaagccggatgcttttttgtttttatcgggattgctctgaaatgcgtttcaaaacgtatgatatcaatatcatacgcatcaggaggatgaaacacatgatacataaaaaacagggtctgttccctgatacatttctatgggggtcagcttcggctgcctatcaggttgaaggagcttggaataagacggtaaaggaccttcagtatgggtgaactgtgcagagaggctattagtgacggagttcatctcatcggctgctgcagctggtcattcacggatctgtttaagctggctgaacggctatcaaaaacgctacggttttgtgtatatcaatcgagatgaagaagatgaaaaagacttgaaacggatcaggaaaacagtttttattggtaccagaatgtaattgaaacaaacggtaaaagtttataaaagttccctgagagaaatatgattctctcaggggtttcttttacattgcgtctgcatcaataatatacgtatccgcatgaagatcggatatttcggcaggcactgaataacaggtaaggctgtatcggcctttcggaatattaaagaaaagccgctttgacatcacgctttcaatctcaattccatcttttacagcctcaaagggaacagtcgcttttttctcataggatagtaccggttcacttgtgttaagcctgaagacgataaatgccctcgtatttctccttgcttcgaatgaaacagctccgtcagcttccgcatatcctttttcaatggcttcatcggtccaatcgataacaggcggttctgaatctttttggaagattgtaaattgatgatacgaaatggccagttcttgcggtttccatgatttattcaatgcgctgttcctcctgtttttttacttgattttaaataatactctcgttccgtcgggatcattggtaagctggtgtccgacccaagagccggctccgcggttgtctgccggagaaatatattctacggaggcattgtttccgccctgtttacaaaccgccatcggccattcatccctatcgtatcccgttttgacaggcacatgtttaagagattgctcacgccgcttatgtactccgtctctgtcaatggtgcatatgctggaatgcccttcttttatcgcgtccttaatatgctttgctgtttccggatatcgatcggacggaaataggattactttgtcgtaatcactcttctgaacggtctgctcgttatctgagaaaagatcacccttgatcagggccgcgactgctccggcaatgatgataagaacaagcagcagtgcttttaatgttttcaagagtatcaatcacctccagttttaaattgctgtaaagctggtccaagaataaagcagaatcggccggctgtaaagctgttaaaatatatttctcagccgcaattcagctgaatatctgtaaaaccatccgcacaaatcaattttattcattaaatatccgatcagaaagtgttttttgccgtttccctattcagaaatgaacggttgcggccgtatcgtcaattgacttattatagcgataagctcaccggcaggatatcttcgtctgcgagtgtccgacccgaaaaccttggcctgcatgaccgtgcgcaacaagacgataaaaagacggccatctgataagaaggccgtcagtaaatcattccagattcgcatgctttgtaaacatgtctgctgaattcagttcttttttctccatgatttttagaataaccgcatcgtaaaacagcagaagagtttgttcgaataaagaacccatcggctgaatcgtctttctgtctccgccggtctcttccttaggagagccgggaatcgttatcgtaagatccgcaagtttgccgagacttgaatcggggttaatcgttaatgcagtgatgatgccgttaaggcttttggctttttcagctgtatgaagcagactttttgtttcgcctgagcctgagccgatgatgacgagaccgccttcttggaggggaggggtaagcgtctcaccgacgatgtaagcgttcaggccgatgtgcatcatcctcatggcgaacgctttagccataaagccggaacgccccgctccggacgtgaagatttgatctgccgataaaatctcatctgcaagcttgtcagcttcactgtcggctattaatgctgcggtgcgggatatttcattgagtatttcatgtaagtattcagtcgttttcatgatccttgtgaaatcagctgtttcattttagcagcagcatccgctttattgtcagctcccgtaatgcctccgccgacaatgattaaatctgggttttgtttgatggcttcaggaagcgtatcaagtttaatgcctccggcaattgcggttttagcgctcttgaccgcttttttaatcgccgtcagttcctcgaatgaattctttccttctgcttgaagatcataacctgtgtgaacacaaatataatcaacaccgagttggtcaatttcttttgcccgtgtttcaaggttttttacgttaatcatgtcgacgagaattttttctgctgtttttttgcttcggcaaccgcccctttgatcgttgagtcgtctgtcgctcctaaaacggtgatgatgtcggcgcccgcttctgccgctttcatgatctcgtagccgcctgcatccatgattttaagatcggcaagcactttcaggtgaggaaaggctgatttcatttcctgtacggctttcaggccttcattaatgacaacgggagtgccgatttctacaacatctatatattgttcgacctctttcacaagttcaattgcttccgggatattcactaagtctaatgccagctgtaattccactttatatccactcctctttttcatgtatttacattctatagagtgccccgcatgttgagaagtacgcactttgaagtctaatagttactttgaggatactgtccccgcaggcaatgcgctttgtttcagcaaaactgcgtggtagtataaactgatgaaagttgtgtaaaaaagtaagcgtgtatgaatagatgatgaacgtacaaaaagtaagaggaaggagaatggcccgtgagccgaatggatgagaaaacgtttaattgcgaaaaggaattgacgcttgccgtgataggcgggaagtggaaaatgctgattatgtggcacctgggaaaagaaggaacaaagcggtttaatgagctgaaagctttaattccggatattacgcacaaaattcttgtgaatcagctcagggagctggagcaggatctgatcgttcacagggaggtttaccctgtcgtccctccgaaagtggagtactcattaacggagcaaggagagacccttatgccgattttggacgccatgtataagtggggaaaagaatatatggaattaatcaacattgataaaactgcaataaaggaatctttttgaagcgctctatgtaaaatagagtgctttttttgcggtttaatgaaatcatattgcgaacgattaaatctcctgtttcggttcttgcgctgttttttccccatcagctcatatatgaaaactattttcattctgccataactggatattcgagagatttatactatagtttaaagatttttaattttacataaataatatttttaaaaataaattgcgggatgccgcaaaataccctctggaattgtcggaatttttttcggtgtgccgaatgaaacttttcacccatttttcggtgataaaaacaataatttcatataaagtgaacgtaagtagatatatagtaattcatgaagaaataggtaaaccctgttgcttacaaacattggattcttgtcttgatttctcataaatttgagccgcatttcggactgtgcgggtgagtggattgcggatttcggcggtgattgaatcgggatcgttttggaggtaagtggttcttttggcttgataatgagttagggacattgagggaggctgtttctaagggagaattgacaattttatcttaaaaaggggaggcgcacacatatggaaataactttttatcctttaacaaatgctcaaaaacgtatctggtatacagaaaaattctatccgaacacaagtatttcaaatcttgccgggttcgggaaactcatttctgacgacggcgtacaggctcattacgttgagaaagcgatacaggaattcgtccggcggtatgagtcgatgagaatccgtctgcggcttgatgatgagggggagcccgttcaatatgtgagcgattaccgtccgctgactatcgaacatacagacatcaggcaagccggctgctctgcggaagagctgtcaaaatggggacgtgacgaggcaagcaagcctctggcattatatgatcaggatttattccgtttttccgtgtataccatcagcgaaaatgaggtctggttttacgttaatgtgcatcacattatttcagacgggatttccatgacgattctgggcaatgcgattactgatatttatttggagctttcgggcggagcaagtatggaacagacggagattccttcctttatcgagcatgtgctgactgagcaggaatatgtgcagtcgaagcggtttaaaaaggatcgggatttttggaacgggcagttcgagaccgtgccggagcttgtgtccctgaaacggagccaggcagatgcgggtcttgatgcgaaacggttttctcaagaaattcctcacgacttatacggccgcattcattcattctgcgaggagcataaagtcagcgtactatctctgttccaatcagctttgatcacttatctctacaaagtgaccggccgggatgacgttgtcacgggtacgtttatgggaaaccggacgaatgcgaaagaaaagcagatgctcgggatgttcgtatctacggttcctgtgcggacaagcgttgacggaggacagtcgttcttggaattcgttaaaggccggatgaaggatctgatgaaaattctccgccaccaaaagtatccgtataacctgcttgtcaatgatttgcgcgcttcgaaaagttcgctgagcagattgtttacggtggctctggagtaccaggtgatgcagtggcagaaaaaagagaatctgtccttcctgacagaccctattttcagcggaagcggtacaaatgatatttcgattcatgtgaaggaacgatgggacactgggaaattgacgattgattttgactatcgcagcgacatattcaagggagaggagattgtatctgtttctgaacgtttgatcacgctgattgaagatgcgatttcatctcctgatcgcataattgatgagcttactcttctttctgaatccgagaaagagcggctgctgacacgggcctccggtaatccggtgaattaccgcggggagatgacgataccggggctgtttgaagagaaagtgaagtcactgtctgacaaaccggcggtggtgtatgaaggccgaacattgtcctatcgcacattgcatgaacagtcaggccgaattgccggacgccttcttaaagccgggatatcagccgattctcctgtcgcggtgctgcttggccgttctgagcgtgttattgcggcaatattgggaattttgaaagcgggcggcgcctatgtgccgatagatcctgactttccggcggatcggattcagtacattttggaggacagcggagcgaaggctgttctgacagaggccggaatacaggcgcctgcagcggatgccgaacggattgattttgacgaggctgttcagtttgaaacggctgcggacggtgtcagtacacaatcagaccggctggcttacatcatctacacgtcaggtacaacggggcggccgaaaggcgtgatgattgagcaccggcaagttcatcatctggtgcaatcactgcagcaggagatttatcaatgcggtgagcagacattaagaatggcgcttttggctccgtttcattttgatgcgtccgtcaaacagatttttgcctcgcttcttttgggacagacgctttatatcgtgccgaaaacgactgtaacgaatggctcggcactgctggactattatcgtcaaaaccgaattgaagccactgacggaacccctgcgcatctgcagatgatggttgcggcgggagatgtcagcggaattgaattgcgccacatgctcattgggggagagggcctgtccgccgctgttgctgaacagctgatgaacctctttcatcaatcgggcagggcgccgcgtctgacgaatgtctacgggccgacagaaacgtgcgtagatgcgtccgtgcatcaggtgtccgccgataacggaatgaatcaacaggcggcgtacgttccgatcggaaaaccgctcggcaacgcccgtctgtatatattggataagcaccagcggcttcagcccgacggcacggccggtgagctgtatatcgcgggtgacggtgtaggccgcggctatttaaatcttccggatttgaccgcagagaagtttttgcaagatccgtttaacggaagcggccgcatgtaccgcacgggtgatatggcgcgctggctgccggacgggacgatcgaatatatcggacgtgaagatgatcaggtgaaagtccgcggctaccgtattgagctgggagaaattgaaacggtgctcagaaaagctccgggggcggcgcaggccgtcgtgctggcacggccggatcagcagggcagcttagatgtttgcgcatatatcgttcaggaaaaaggaaccgagtttcaccctgccgagtacagggagtatgtgtccaagcaccttcctgattacatggtgcccgcttactttacaaaaacggacgaaattccgctcacgccgagcgggaaggcggaccgcaaaaagctgtttgcgcttgatgtgcaggctgtcagctcatccgaatatgccgcgccgagaaacgaaacggaggaaacgctcaccgtcatctggcaggaagtcctcggaatggacaaggcgggcatttatgatcatttcttcgagtcaggcggtcattcattaaaggcaatgacgcttctgacgaaaattcataagcaaatgggcgttgaaattccgctgcaatacttgtttgagcatccgacgattgcggcgcttgccgattatgcggaaaaccgaaacgaaggaccggcattcagggcgattgagccggctgagaagcaggcgagctatccgctttcgctcgctcagcagcggacttatatcgcgagccaatttgaagatgcgggagtcggatataacatgccggctgcggccgtgattgagggcgctttagaccttgaaaagctcgagcgtgcattttctgccttaatcagcaggcatgaagcgctcagaacatcgtttcaatcggaggacggcacgccgagacaggtggttcacgaacatgttccgtttcatattgaaatgctcgaagcgcgcggaagaacgaatgaacaggtcatgaaggactttgtgcgccgttttgatttatctgaggcgccgctgttcagaatcggcctgcaaacgctcggtcacaatcgccatatgctgctgtttgatatgcatcacctgatttctgacggggtgtctatttccatcatgctgaaggaactggctgacatctacggcggaaatcagctgcctgaattgcgcattcaatataaagattatgccgtatggcaggcggaacgggcgaaagaaggctacaagaaggagcgggcgtactggaaagaagtcttcagcggcgaactgccggtgcttcagctgctccctgattatccgcggccgcaggtgcaaagctttgaaggtgaccgcgtgtccgccaagctgccgaaaatgctgcgggaacggctgcagaagcttgccgagaaaaacggagccaccctttacatggtgctgttatcggcatactatacgctgctttctaagtattcgggacaggaagacatcatcgtgggaacaccgtcagcgggaagaaatcactctgataccgaggggcttatcgggatgtttgtcaacacgcttgcgctgcgaagctccgtgaagcaggatcagacatttgccggcttgttaggtcatgtgcgcaaacaggtgctggacgcgttttcccatcaggattatccgtttgagtggctgaccgaggagctgaacgtgccccgggacatgagcaggcatccgatatttgacacgatgttcagtctgcaaaatgcttcggacggaattccggagatcggcaacctgacgctgtctcttcatgaaaccaacttcaatatcgctaaattcgatctgacaatgcaggcccgggaaacagcggaaggcattgcgctcgatttggattattgcacgaagctgtttaagcgctcaactgcggatcgcatgcttgcgcactatgtccgtctgctggagagtgcggcagctcagccggatgcgaaaatcagcgaatatgatctgctttctgaacgggaggctttgaaccaattacagcggttcaatccggagcgcacggcatacccgaaagagcaaacgatcgtgcagatctttgaagaacaggcccgaaagaaccctgaccggacggctcttcagttcgaaggggaaactctgtcgtatcagcagctgaatgaacgcgccaacaggcttacgcggcatattctttcggtcggaggcggcgggaaaaccgcggctgttttatgtgaacggtcaatggacatgattgtttccattatggctgtgttaaaagcggggtccgcctatgtgccgattgatcctgagcatccggttcagcggattcagcatttcttccgcgacagcggggcgaatgtgctcctgactcagcaaagcctcaagccgcttgcggaaaaggccggttttcaaggcgtcattgtgcttgctgatgatgaggcgagctatgaaaaggactctcgcaatccagcattgccgtttgattccaaaacgattgccaatctcacgtatacatcaggcacgacgggaacgccgaaaggaaacatcgtcacacatgccaacattttgcggacggtaaaaaacacgaactatttgaccgtttctgaagaggacacagtgctcggtctgtcaaactacgtctttgacgcttttatgtttgatatgttcggttcgctgttaaacggtgcaaagcttgtgatcgtcccgaaagatacggtgctggacatgtcgcgcctgtcccgtgtgatcaaacgggagaacgtcagcattctgatgattacgacggccctgttccacctgcttgttgatatggagccgtcctgtctgacgacgcttcggaaaatcatgttcggggcgaaagagcgtctgtagaacatgtcaaaaaggcgctggcggcagtcgggaaaggaaaactgcttcatatgtacggtccgtcggaaagcacggtgtttgcgacataccatccggtggatgtcattgaagaggatacgctctccgttccgatcggtaaaccggtcagcaatacggaagtctttattatgaactcagccggacgcattcagccggcgggtatcgcgggagagctgtgcgtcagcggggaaggtctcgtagaaggctactacaaccgtcctgaactgacggaagaaaaatttgtaaagcatccgtttaaggaaggtgaacggatgtataaaacgggcgacttggccagatggcttccgaatggcgatatcgagtttatcggacgcatcgaccatcaggtgaaaatccgcggtcagcggattgagcttggcgaaattgagcatcagcttcaaagccatgatcagattcaggaatgcattgtgctcgctgtggatcagggcgcgggtgacaaacttctttgcgcgtattttgtcggcctcagggaaatatcttcccgggagctgagggagcatacggcgaaggatcttccggcttatatgattccgtccgtctttattcaattggatgaactgcctcttacagggaacggaaaaatcgacaggcgggcgctgccgatgccggatgtgaccgcagcgaatgccgtgtcatatacggcgccgcgcaatgaaacagaacaaaaactggcggatatttgggctgaggtgctgcaaatggaacgggtcggcgtccatgatcagttctttgagatcgggggccactcgttagcggggatgaaactgctggcccttatccagaagacattcggcgtgcagcttaccttaaaggatctgttcacttctccgacggctgctgggctggcgcagctgattgaaggggctgagcggaaggcggctgagagcatcgcaccggctgcggagcgggaaacgtatccggtttcttcaccgcagaagcggatgttcgtgcttcagcagctggaaggcgctgaaacaagctataacatgccgtctgtgctccgtttaaaaggaaagcttgatgcagaaaagctgaaatccgtcatgaaacagctgacagaacgccatgaagccttcagaacgacatttgacataaaggatggagaaacggttcagcgtatatgggcggaagcttatatcgacatggaatattatgaagcctctgaagaagatgctgaacggattattcagagctttatccggccgttccgtctggatcagcttcctctcgtcagaacggggctggtcaagctggctgaacatgaccacctgctgctgtttgatatgcaccatatcatttcggacggcgcttcagtcggcgtgctgatagatgaactgtcccgcttgtatggcggcgaaacgcttgagccgctgcggattcattataaagactatgcggtatggcagcagaaatttattcaatcagagcagtaccgcaagcaggaggagcattggcttcgggagcttgacggcgagcttccggtattgacgctgccggctgattacagccgtccggccgtgcaaacctttgaaggagacaagctggtcttttctctgactgaggaacagacgtcggctcttcgcagtcttgcgaaacaaacggattctaccatgtacatggtgctgctggcgtcgtacagcgcctttctctcaaaactgagcggacagcatgacatcattgtcggctcgccggttgcgggacggtcacatgcggatctcgcaaacgtcatcggtgtttttgtgaatacactcgcgctgcgtacgtatccggaagcggacaaaacgttcacggactatcttaaagaagtgaaacaaaccgctttacatgcatttgacgcgcaggattatccgcttgaagaccttctgcaaaaggttgaggtgcagcgtgatacgagccgaaatccgctgtttgatgcggtattctcaatgcaaaatgcaaatgctgaagatctggtcatggaaggaattgagctgaagcaccacccgtttgacagaaaaacagccaagtttgacctgacgatgacggctgaggacacagacgaaggcttaacgtttgtgcttgaatataacaccgcgctgtttaaaccggaaacggcagagacgtggaagcattattggcttcaactgttaaaagccgcaacggaaaatccggctgcgaagctttctgagctttccttggtgaatgaaacagaaaaacaagccctcctcaatgcatggaaaggaaaaacaatttctgtgccgcaggacaaaacggttcaccgtctctttgaagaaacggccgcccgatacgcgaaccggccggccgcggcatataacggcgcgaaatggacgtacggcgagctgaacgcaagggcgaaccggatcgcgcgcattctcatagactgcggcgtcacggctgacgaacgtgtcggcattttgacgaaaccgtccttggaaatggccgcgggcgtactcggcgtcctgaaagcgggcgcggcatttgtgccgattgaccccgactacccacaagagcggatcagctacattctgcaggacagcggcgccaagcttcttctcacacaggaagcgctggacgtaccggatggctacacaggagatacgattctgcttgacggcggacgctccattctgagcctgccgcttgatgaaaacgatgaagcgaacccgcagactgaaacaacggcggatcagctcgcttatatgatttacacgtcaggaacgaccggacagccgaagggtgtcatggtcgaacaccatgcgctggtgaacctgtgcttctggcatcacgacgcattcgccatgacggcggatgataaaagcgccaaatacgcgggctttggttttgacgcctccatctgggagatgttcccgacatggaccatcggcgcggaacttcacgtcattgacgaagcgatccggctggatatcacccgcttaaatcactatttcgaggagcacggcgtgaccatcaccttcctgccgacgcagctggccgaacaatttatggagctggaaaatacctctctccgcatgcttctcgtcggcggcgacaagctgaagcgggcggtgaaacagccgtacacgatcgtcaacaactacggcccgacggaaaacaccgtcgtcgcgacaagcggcgtcatcaatcctgaggaaggatcgctttcgatcggacgggcgattgccaatacgagagcttatattctcggcgacggcgatcaggtgcagccggaaggcattgccggtgaattgtgcgtggccggccgcggtctggcacgcggatacctgaaccgtgaggaagaaacggcgaagcggtttaccgcagatccgttcgtgcccggcgagcgcatgtaccggaccggcgacctcgtcaaatggaacgcgcagagcggcatcgaatacatcggccgtatcgaccagcaggtcaaagtgcggggctaccggatcgagctttcagaaatcgaagtccgcctcgcccagcttgcggacgttcatgacgcagcggtgacggcggtggaagacaaagcgggcaataccgcgctttgcgcctatgtcgcgcctcggcaggacgatattgaagcgctcaaagccgcgctgaaagacacgcttccggactacatggtgccggcgttctgggtggagatggacgagcttccggtcaccgcaaacggaaagattgacaaaaaagccctgccggaaccggacattgaagcgggaagcgccgcttataaagcgccggaaacggagatggagacgctgctttccgacatttgggaggaagtgctcggtcttgatcagatcggcgtaagcgataatttcttcaccctcggcggcgactcgatcaaaggcatccaaatggcgagccgcctgaaccagcacggctacaagctggaaatgaaagatctcttccagcacccgaccatcgaagagctcgtctcttatgtggagcggacggaaggcaagcaggccgatcagggacctgtcgaaggcgaagcggagttaacgccgatccagcgctggttctttgagaaaaacttcacggacaaacaccactggaatcaatccgtcatgcttcatgcgaaagacggctttgatccggagataacagaaaaaacattacatgtcctgacggtgcaccatgatgcgctccggatgatttatcgtgaacaaaaaccgtattacagagggcttgaggatgcgtctgttgaactgaacgtctttgagctgaacggacctgctgaagatcatgaggaccgtatcgaacgggaagcagaccgtcttcaaagcagtatttcactggaaacaggacatctgctgaaggccgggctcttccgggctgaagatggagaccaccttcttctcgcaatccatcacttagtcgtggatggtgtatcttggcggattttactggaggacttcacgtccgtttatacgcagctgaaacaaggcaatgaaccggcgctgcctccgaaaacacattcattcgccgaatttgctgagagaatcaaagaatacgcaaatacgaaggcgtttctgaaagaagcggattactggagggggcttgaggagaaagaggtatgcactcagcttccgaaagacaggcagtctggcgatcagcgcatgagacatacgagaacggtcagtttctctctgacgcctgaacaaactgaacagctgacgacaaacgtacatgaagcctaccatacggaaatgaacgacatcctgctcacggcgctcggactggcgctgaaagagtggacgggtgaagacacgatcggcgttcatttggaaggccacgggcgcgaagacattcttgacggcctgaatatcacccggacggtcggatggtttacgagcatgtatccgatgatccttgagatgaagcacgccgacgatctttcatatcagctgaaacaaatgaaagaagacatcagacacatcccgaacaaaggagtcggctacggcattctgcgttatgtaacggcgcctgagcataaagagggtctttcatttgagattgatccggatatcagctttaactacttaggccagtttaatgagatgtcggattccggcttatttacaagatccgggatgccgtcaggacaatcgctgagccctgacacagagaagccgaatgcgcttgatattgtcggatttatagaaaatgggcagatgacgatgacgtttgcctatcattctctcgaatttcatgaaaaaaccattcaatcgttcagtgacagctttaaagggcacctcttgaaaatcatagatcactgcctggcccaagacggacctgagcttacgcctagcgatcttggcgatgatgatctgacgcttgatgaacttgataaattaatggaaattctctaacagaaaagacagaggtgacatatgagcaaaaaatcgattcaaaaggtgtatgcactcacaccgatgcaggagggaatgctgtatcatgcgctgcttgatccgcattcttcctcctacttcacacaattagagcttaggattcacggaagctttcagcttgagctttttgaaaaaagtgtcaatgagctgattcggacatatgacatcctgcgtacggtattcgtgcaccagcagcttcaaaaaccgcgccaagtcgtattagcagagcggaagacgaaggtgcactatgaagatatcagtcaattagatgaagcgcgccaaaccgaatatattgaacgctataaacgcgatgtgcagcagcagggctttcatctggcgaaggatattctctttaaagcggcggtgttcaggctcagtgagaaggaactgtatctcgtctggagcaatcatcatatcgtcatggacggctggagtatgggcgttttgatgaaaagcctgtttcaaaactatgaagcgcttcgtgccggccggcccgccgggggaagccagggcaaaccttactctgactatatcaaatggctcggaggcagggattatgaggaggcggaacaatattggagcagccgcctggcggatttcgaacagccgagcctgctcccgggccgtctggcatcagaaaagaaagactaccaaaatgaagaatattcttttgtctgggatgaagagctggtcgcgcagattcagcagaccgccaaccggcatcaagtcacggggcctaacctgtttcaggccgtttggggtgcggtgctcagcaaatacaactatacagacgatgtggtgttcggcaccgtcgtatcaggccgtccttcagaaatcaacggcattgaaacgatggcggggctgttcatcaatacgattcctgtcagaatcaagattgacaaagatgcagccttttctgacgtgatggcggcagttcagaaaaacgccgtggaagccgagcgctatgattatgtgccgctctatgacattcaaaagcgctccgctctggacggcagcctcttgaatcatttggtcgcgtttgaaaactatccgctggacaaagagctggaaaacgggggcatggaggaaagactcggcttttccattaaagttgaacatgcttttgagcagacgagctttgatttcaatctcatcgtgtatccgggaaaaacgtggaccgtcaaaatcaaatacaacggagcggctttcgcacatgatgccatcgaacgaacggcgcaccatctgacctgcatgatgaaagcggcggtcggaacgcctgacgcgcccgtgcgggaactcggccttgtttcaggcgaagaagagcggcagattgttgagatattcaatgatacgaaaacggcgcttccggaagaggaggccgttcaccgtttgtttgaagcacaggcaaaccggacgcctgcaagcatcgcgataaaagaagagggacgcgaatggacctaccgtgaagtgaacgaagcggccaaccgcctggcgagacaccttgtgaagagcgggctggaaaaaggccggaccgccgctattatgaacgaccggtctgcggaaaccgttatcggaatgcttgccgtcctaaaagcaggcggcgcctatgtgccgattgatccggcttttccggaggaccgtctccgctttatggcggcagacagctcgattcggctcgtgctgacagttcaggactatcaagaacaagcgggcacattgcaagtcccgattgtcatgctgaatgaaagcgcggatgaaacggtaagcggaacagacttgaatctcccggccggcggcaacgacttggcgtatatcatgtatacatccggatcgaccggcaaaccgaaaggcgtcatgattgaacacagaaatatcatcaggctcgtcaaaccttcgaattacgtgccggttcatgaagaagaccggatggcgcaaacgggagccgtcagctttgatgccggaacctttgaagtcttcggcgcattgctgaacggagcggcattgcacccggtgaaaaaagagacgctgcttgacgccggacgattcgcccaatttctgaaagagcagcggatcacgaccatgtggctgacgtctccgctgtttaatcagcttgcccaaaaggatgccggcatgtttaacacgctccggcacctcatcatcggcggtgatgcgcttgtgccgcatatcgtcagcaaagtgaggaaggcatcaccggagctgtcgctttggaacggctacgggccgacggagaatacgacgttttcgacgagttttctcattgatcaggactacgacggttcgatcccgatcgggaagccgatcggaaattccactgcgtacattatggacgaaaaccgcaacctccagccgatcggcgcgcccggggagctgtgtgtcggcggaagcggagtggcaagaggctatgtgaatctgcctgaattaacggagaagcagtttgtccgcgatccgttcagaccggatgaaacgatataccggacgggggacttggcgaagtggcttccggacggcacgatcgagtttctcggcagaattgacaaccaagtaaaggtccgcggtttcagaatcgagctcggcgaaattgaggcgaaaatcagccaggcggagaatgtgacggaatctgcggctgtgatccggaaaaataaagcggatgaaaatgaaatctgcgcttactttaccgcagaccaagccctttcgccggaagacctgcgcaaaacgctttcggaatcacttccggaatacatgattcccgcgcacttcatccagatgaatcagtttccgctgacggcgaacggaaagattgataaaaaagcgctgcctgagcctcaggctgaagccgttcaaaaagaatacgaagcgccgaaaacggaagcggagcagaaactcgcggacatttgggaaggcattctcggtgtaaaagcgggtgtgactgacaatttcttcacgattggcggacattctttaaaagccatgatgatgaccgctaaaatccaggagcactttcaaaaagaagtgccgattaaagtgttatttgaaaagccgaccattcaggagcttgcgcattatttggagcatgagaccgaggaggaacagcagtttgaaccgatccgacaagcgccttatcagaagcattatcctgtttcctcagcacagcgcaggatgtatatccttaatcagctcggacaggccagcacgagctacaacgtccctgctgtacttctgctggaaggatcagtagacaaaaaccgtcttgaagaggccatgcaggcattaatcaaccgtcatgagacactgcgtacgtcgtttgacatggcagatggagaagtcgtgcagaccattcataaaaatgtgtcgtttgagcttgaaaccgccgagggccgggaagaagatgcagaagagctgacaaaagcctttatcaggccgtttgcgctcaatcgtgcgccgctggtccgttcgaagctgatccggcttaaagaagaccggcatcttctgctgattgacatgcaccacattattacggacggaagctcaatgggcattttcatcggtgatcttgcgaagctttatcaaggcacggagcttgagctgccaaagattcattataaggatttttcagtctggcagcgtgaaaaagcaaatcttgatcagcacgaagcttactggcttgatacgttcaaaggcgatctgccggtgctggatctgccgcttgatttcccgcgtcctgccgagcgcagttttgaaggggaacgcgtcatcttcgggcttgataaacaggtgacggcgcagattaagaagctgctggctgatacggatacgacgatgtacatgttcttgttagccgcttttcaagtgctgctgtccaaatattcggggcaggaagacatcatagtcgggtctccggcggccggaagacagcatcctgatctccaagacgtgccgggcatgtttgtcaacacagttgcgcttcggtcgcatcctgccggcaaaaaaacgttcaagcaatttctggatgaagtgaaaacggcgagccttcaagcttttgagcatcaaagctatccgcttgaagaattaattgaaaaactgccgttaacgagggacacaagccggagtccgctgttcagcgtgttatttaatatgcagaacatggagatcccggccctgcggctcggagatttggagatttcttcttactccatgcatcatcatgtcgctaaatttgatctttccttagaagcggctgagcgcggagaagaggtcggattgagctttgattacgcgaaagccttatttgcggacgaaaccatccgccgctggagcgctcattttgtcaatctgattaaagcctgcgccgaaaatccggatattcagctggccgacgcaagcctgctgtccgctcctgagcgggaagcgctcctttctgatgaaaaacggacggaagcggatctgcctgagggcacttttgtttcgctgtttgaacggcaagcgcagaaaacgcctgatctcacggcggttgcgggcggaacaagtctgacatatcgtgagcttgatgaacgctcgaaccggtttgcccgacaccttcaggcttgcggaacgggcagtgaggacatcgtggccattatgatggatcgttcggccgacttgattaccgcgattctcggcgtcatgaaagccggagcggcatttctcccgattgatccggagactcctgaagagagaatccgctactctctcgaagacagcggaacgaagcttctggtcgtcaatgagagaaacatgaccgcggccgccgtttataaaggaaaaacggtcgtaatggaagacggagaatggcagaacgaaagcgccgaccggcttgaaacggagtccggcgccgaccggcttgcctatatcatttatacctcgggaacaacgggcaaaccgaaaggcgtccagctggaacaccgcaatctaatcaattatgtcacatggttcagccgtgaagccggtttgaccgaagctgacaaatccgtgctgctgtcttcttacgcatttgatctcggctatacggccatattcccgattcttcaggcgggcggcgagctgcacattgtgccgaaagagacgtacaccgcgcctgatcagcttggtgagtatatacagaaaaacggcattacgtatatgaaactgacgccgtcattgttccatatgatcgtcaatacagcccgttttacgtcagaacgccgtttcagctcgcttcgtttagtggtgctcggcggagaaaagatcatcacgtccgatgtccgcaagtttcatgacgtatacgcccataccgacttcatcaatcactacgggccgacggaaacgacgatcggcgccattgcggaacggatcaatatggagcgtcttgatcaatatgagcagcgtcccgtcatcggccgcccgatcgcaaataccggcgcgcttgtattggacggagcaatgcagctcgttcctccgggcgcaagcggcgagctttatattaccgggaaggggcttgccagaggatatcttcaccgtccgcagctgacggcggagaaatttctctcaaaacctttttcaccggacagcctgatgtacaaaacgggagatatcgtccgcaggcttcctgacgggacgattgaatttatcggccgtgcggatgatcaggtgaaaatccggggctaccgcattgaattaaaagaggttgaaaccgtgctgttaagcgtaaacggcattcaggaggcggtcgttctcgcagtcagcgaaggcgggctgccggaactgtgcgcgtactataaagccgacagcgggctgaaaggctctgagcttcgcaaacggctttccgaaacactgccgtctcatatgcttccggcctatttcgtgcaagtagaccgcattccgctcacagccaacggaaaaaccgataaaaacgccctcccgaaaccgggcgtcagccaaacggcgcaaattgcttcagccttgccggaaacggaattggaggaaaagctgtgccgcatttggaaacagacactcggtacggatacgctcggcatcgacgataatttcttcgattacggcgggcactctttaaaaggaatgatgctcctcgccaatattcaggctgaactggacaaaacggttccgttaaaagcgctgttcgaacagccgactgtccgcctgcttgccgcatatatcgaaaaatcggcggtatctgagggatatcggatgatcacaccggcagacagtgcagacgcgtacccgttatcatccgcccaaaaacggatgtacgttctgaaccagcttgaccgggagacaatcagctataatatgccgtccgttcttctgatggaaggagaagtcaatatttcaaggcttcagaaagcgctcaatcagatgatcaaccgccacgaatctttgcggacgtcctttatcgatcaaaaaggccagccgatgcagcagatcgcagaacaggctgacattgacctgcacatttttgaagcagcggacgaggagaaggcggatcttatcattcaggcattcattaagccgtttgatctgagcgcggctccgctcattcgggccgctcttgtcagactgaatgaaaagaaacacctgctgctgctggatatgcatcatatcattgccgacggcgtgtccagaagcatgctggtcaaagagctcgctcacctttacaaaggcggaagtctgccgtcgccgaacctgcactataaagacttcgccgtctggcagaatgaacccgggcaggccgaacggatgaaagaccatgagcgttattggctctcggcattttccggcgagcttcctgaattgaatctgccgaccgattttccgcgtccgccggttcaaagttttaaaggacaatccgtccgtttcagagcggggcgtgagacggaaaaagcggtgcgtgaattaatggaatcatcgggagcgactcttcatatggtgcttcacgccgcgttccatgtctttttgagcaaaatcacgggacagcgcgatatcattatcggttcggtgaccgcgggaagaacgagcgccgaagttcaggaaatgccggggatgtttgtcaatacgcttgcgcttcgcaatgaaacgcaaaaagagcagaccttcgccgggctgctcgaacgggtgaaacaaaccaatctcgacgcgctggcgcatcaggattatccgtttgaggatctgatcggaaagcttgacctgccgagagatatgagccgcaacccgctgttccaggtgatggtgacgacagaagatccggataaagaaacactggaactggagaacctgcgcatcactccgtatgagtcaaaccaaggcacggcgaaattcgatctgacactcggcggctttacggatcaagaaggtctcggccttcagtttgaatatgcgactgatctgtttaaaaaagaaaccattgaaaagtggagcgccgggttcctgcggattctgaagcaagcggcggaaagcccggacagaaagctgcctgagatttcactgatcagcgatgctgaaaaacaagccctccttgacgcatggaaaggaaaaacactctctgtgccgcaggacaaaacggttcaccgtctctttgaagaaacggccgcccgatacgcgaaccggccggccgcggcatataacggcgcgaaatggacgtacggcgagctgaacgcaagggcgaaccggatcgcgcgcattctcatagactgcggcgtcacggctgacgaacgtgtcggcattttgacgaaaccgtccttggaaatggccgcgggcgtactcggcgtcctgaaagcgggcgcggcatttgtgccgattgaccccgactacccacaagagcggatcagctacattctgcaggacagcggcgccaagcttcttctcacacaggaagcgctggacgtgccggatggctacacaggagaaacgatcctgcttgacggcggacgctccattctgagcctgccgcttgatgaaaacgatgaagcgaacccgcagactgaaacaacggcggatcatctcgcttatatgatttacacgtcaggaacgaccggacagccgaagggtgtcatggtcgaacaccatgcgctggtgaacctgtgcttctggcatcacgacgcattcgccatgacggcggatgataaaagcgccaaatacgcgggcttcggttttgacgcctccatctgggagatgttcccgacatggaccatcggcgcggagcttcacgtcattgacgaagcgatccggctggatatcacccgcttaaatcactatttcgaggagcacggcgtgaccatcaccttcctgccgacgcagctggccgaacaatttatggagctggaaaatacctctctccgcatgcttctcgtcggcggcgacaagctgaagcgggcggtgaaacagccgtacacgatcgtcaacaactacggcccgacggaaaacaccgtcgtcgcgacaagcggcgtcatcaatcctgaggaaggatcgctttcgatcggacgggcgattgccaatacgagagcttatattctcggcgacggcgatcaggtgcagccggaaggcattgccggtgaattgtgcgtggccggccgcggtctggcacgcggatacctgaaccgtgaggaagaaacggcgaagcggtttaccgcagatccgttcgtgcccggcgagcgcatgtaccggaccggcgacctcgtcaaatggaacgcgcagagcggcatcgaatacatcggccgtatcgaccagcaggtcaaagtgcggggctaccggatcgagctttcagaaatcgaagtccgcctcgcccagcttgcggacgttcatgacgcagcggtgacggcggtggaagacaaagcgggcaataccgcgctttgcgcctatgtcgcgcctcggcaggacgatattgaagcgctcaaagccgcgctgaaagacacgctgcctgactacatggtgccggcgttctgggtggagatggacgagcttccggtcaccgcaaacggaaagattgacaaaaaagccctgccggaaccggacattgaagcgggaagcgccgcttacaaagcgccggaaacggagatggagacgctgctttccgacatttggcaggaagtgctcggtcttgatcagatcggcgtaagcgataatttcttcaccctcggcggcgactcgatcaaaggcatccaaatggcgagccgcctgaaccagcacggctacaagctggagatgaaagatctcttccagcacccgaccatcgaagagctcgtctcttatgtggagcggacggaaggcaagcaggccgaccagggacctgtcgaaggcgaagcggagttaacgccgatccagcgctggttctttgagaaaaacttcacggacaaacaccactggaaccaatccgtcatgcttcacgcgaaagacggctttgatccggacctggtggaaaaaaccctgcaagcattgattgaacaccatgatgcgctccgcatggtttaccgtgaagaaagggaaggcatcattcagacatacctccctgtcacagaatgcaaggcaagctttgaaatcgttgatctgtacggaacggacgaggatatgctgaaaagccagattcagcggcttgccgatcatcttcagggcagtcttgatctggagaacggcccgctgttaaaagcggagcaataccggacagaacaaggcgatcatctgttaatcgcggttcaccatctcgtcgtggacggggtttcatggagaattctgctggaggatttcgcttcaggttataaacaggcgcagcagcaaaacagcatcgtcctcccgcaaaaaacccactcctttaaagattgggcggaggcgctgaacacgtttgcgcaatcagaagagctgaaaaagcaggcggattattgggcgcaggcagatgcggaagagctccggccgctgccgaaagaccatgatccggacaaacggctcgtcaaacatacggcggccgtgaaatgtgaattgactgaggaagaaacggcacagctgctgacagatgttcatcatccgtacggaacggaaatcaacgacattctgctcagcgcactcggcttaacgatcggtgaatggacggaaaacggcaaagtcggcatcaacttagaaggacacggccgggaagaaatcataccgaacgtcaatatttcacggacggtcggctggtttacggcccaatatccgttgattctgcagatcagcaaggaagacggcgtctcttccgtcattaaaacggtaaaagagacagtgcggcgcgttccagataaaggtgtaggatacggaattctccggtatctgtcatccgatgaaacagaaaaaggcgccgcgcctgaaatcagttttaactacttggggcagtttgacaatgaagtgaaaacggaatggtttgagccgtctccatatgatatgggacgtcaagtcagcgaagagtcagaggcgttatacgcactgagcttcagcgggatggttacaggcggccgcttcgtcatttcctgctcatacaatcaggaagaatatgaaagaagcaccgtcgaaacacagatgcagcggtttaaagacaatcttttaatgatcatccgccattgcacggccaaagaggagaaagaatttacgccgagcgatttcagcgcgcaggatcttgagatggatgaaatgggagacatctttgacatgcttgaggagaatttaacgtgacaaaaacagttaacagaaggggggagcggagcagatgagccagttcaaaaaagatcaagttcaggacatgtattatttgtcgccgatgcaggagggaatgctgtttcatactctcctgaatcccggccaaagcttttacatcgaacaaatgacaatgaaagtaaaaggcagcttgaatatcaaatgccttgaagaaagcatgaatgtgatcatggaccggtacgatgtatttcgtaccgtgttcattcacgaaaaagtaaaaaggccggtccaagtcgtattgaaaaaacggcagtttcagatagaagaaatcgatctgacacacttaacgggcagcgagcaagcatccaaaattaatgaatacaaagaacaggataagatcaagggctttgatttgacgcgggatattccgatgcgggcagccatctttaaaaaatcggaagaaagctttgaatgggtgtggagctaccaccacatcattttggacggctggtgcttcggcatcgtcgtgcaggatctgtttaaggtatacaatgccctgcgagaacaaaagccgtacagcctgccgccggtcaaaccgtataaagactatatcaagtggcttgaaaagcaggataaacatgcatcactgcattactggcgcgggtacttagaagattttgaaggacaaacgacatttgcggagcaaagaaagaaacaagagaacggctatgagccgaaagagctgctcttctcactgccggaggcggaaacaaaagcatttaccgagcttgcaaaatcgcagcataccactttgagtacggcgctgcaggcggtttggagtgtattaatcagccgctaccagcagtccggcgatttgatcttcggcacagtcgtttccgggcgtcccgcagaaatcaaaggcgttgaacatatggtcgggctgtttatcaatgctgttccgaggcgggtgaagctgtctgaggataccacatttaacggcttgctcaagcagctgcaggagcaatcgctgcagtctgagcctcatcaatatgtgccgctctatgacatccaaagccaggccgatcagccaaagctgattgatcatattattgtgtttgaaaattatccgcttcaggatgcaaaaaatgaagagaacagtgaaaacggctttgatatggaggacgtccatgtttttgagaaatcgaattatgatctcaacctgatggcttctccaggtgatgagatgctgattaagcttgcctataacgggaatgtgtttgatgaggcgtttatcctgcgcttaaaatctcagcttctcacagcgattcagcagctcatccagaagccggatcaccctgtcaatacgatcagacttgttgatgaaaaggaaagagagcttctgcttaccggcttaaacccgccggctgagactcatcaggcgaagcctctgacggattggttcaaggaagcggtgaatgtaaatcctgatgcaccggcgcttacgtattccggccagactctttcctatcgcgaattagatgaggaagcgaaccgtcttgcgcgccgtttgcaaaagcaaggtgcgggtaaagacaccgttgtcgcgttgtacacgaagcgctcgcttgaactggtgatcggcattctcggcgtattaaaagcgggagcggcttatctgccggttgatccgaagctgccggaggaccgaatctcgtatatgctgactgacagtgcggctgcctgtctgctgacacatcaggagatgaaagaaaaagcggctcagctgccgtatacaggaacaacactcatcatcgatgatcaagcacggtttgaggaacaggcaagcgatcctgcagccgcaattgatcccgatgatccggcgtatattatgtatacgtccggcacaaccggaaagccgaagggcaatatcaccactcatgccaatatacaaggattggtcaagcatgtagactatatggcattttctgaacaagatacgttcttatctgtttcgaattacgcctttgacgcatttacttttgatttctacgcatcaatcctgaatgcggcacggctcattatcgcagatgaacatacactgcttgatacagaacggctcactgatctgatccggcaggagaatgtcaatgtcatgtttgcgacaaccgcactttttaatcttctcaccgatgcgggagaggagtggctgaaggggctccgctgtgtgttattcgggggtgagcgcgcgtctgtgcctcacgtcagaaaggcgcttgagatcatggggcctggcaagctgattaattgttacgggccgactgagggaacggtgtttgcgacagctcacgtcgtgcatgatataccggattccatttcctcattgccgatcggaaagccgatcagcaatgcaagtatttatattcttaacgggcaaaaccagcttcagccgttcggagctgtcggtgaactgtgcatcagcggaatgggtgtatcaaaagggtatctgaaccgtcacgacctgacgaagcaaacgtttatcccaaatccgttcaagccgggagaaacgctttaccgcacaggggatttagcacgctggctgccggatggaacgattgaatacgccgggcgtattgacgaccaggtcaaaatacgcggtcaccggattgaacttgaagaaatcgaaaagcagctgcaggaatacccgggtgtgaaagatgcggtcgttgttgcagaccgccatgagtccggagatgcatcaatcaacgcctatctcgtgaaccggacgccgctttcagctgaagacgtaaagaggcacttgaaaaaacagcttcctgcttacatggtgccgcaaacctttactttcttagaagagcttcctttaacgacaaacgggaaggtcaataaacggcagctgccgaaaccggatcaggctcaggcggcgaaagaatggatcgggcctcgaaacgcgacggaagaaacgattgcacacatctggtccgagattctcggcagacagcagatcgggattcatgatgatttcttcgcgctcggaggccattccttaaaagcgatgacggcagcgtcgcgcattaaaaaagagctcggtacggacatcccggtgcagctgttattcgaagcgacgacaatcgcagacattgccggttatctgcttcacggtgaagaaaaaggaatgaaagatctcaccatcatgaataaaaatcagtctgacacactgtttgcgttcccgccggttctcggttacgggctgatgtaccagccgctggcaaaacagctgtccggctatagaatctgtgcgtttgattttatcgaggaagacaaccgcatcgaacgctacacagagctgatcaatcagctccagccggaaggaccggtcaagctgttcggatactcggcaggctgcacgctcgcctttgaaacggccaaacggcttgaagccgaaggacgtaaagtggagcggctgatcatggttgattcctataaaaaacaaggcgtcagcgacttggaaggccgcaccgtagaaagcgatgtccaggcgctgatgaaggtaaaccgggataacgaagcgctgaatgacgaagccgtcaaagaaggtctcgccaaaaaaacaaacgcgttttattcttatttcgtgcataccgtcagcaccggcacggtcaatgcggatatagatctattaacgtcagaaccggactttgcgatgccgccgtggctcgcttcgtgggaggaagccacgacaggtgaataccgtgtgaaaaaaggctgcggcagtcacgcagaaatgcttcagggagaatgtctcgaaaggaatgcggcatatttgctcgaattcctaaggaaggaacatccgaagctgacagcttcacgatagaaaaggaggaagcccgccaatggtccagctctttaaatcgttcgataccacggaaaaaacgcagcttatctgttttccgttcgcaggaggctattccgcatcattccgcccgctccacacctatcttcaaggtgagtgtgagatgcttgccgcggaaccgccgggacacggaacaaatcaaatgtccgccgttgaggattttgaacagcttgtcagtttatacaagcaggagttgaatctccatcctgaccgcccgtttgtcctgttcggccacagtatgggaggcatggtcgctttcaggctggcgcaaaagcttgagcgggaggggatttacccgcaggccgtgatcatctcagccattcagccgccgcatgttgaaaggaaaaaagtgtctcatcttgatgatgaaaaatttctcgcccatattatcgagctgggcggaatgccgcaggagttagtggagaataaggaggtcatgtcatttttcctgccttctttcaggtccgactaccgcgcgcttgaaagcttccgtccgtctgattctcacatgattcaatcacccgtccatatttttaacgggcggaaagataaaaaatgtatcaaagatgcggacggatggaaaaaatgggccgacaatcccgtatttcatgagttttcggacggccacatgttcatattaagtgaaactgaaaaagtggcggaacgaatatatgagattattaacaggagcactgcaggccaattgttataggatatgacagacagcattcgctgtctgttttttgtaacaaaatctgcccgtgagttttctcatttatcaaaaattttatgttatgatttgatggaatataattttgaagggattgtcgtacatgaatgatgcagcaaaagagctgaacagaacattatctgaagaaaacccgcacgtgcttcatatgctttctgatttgggcagagagttgttttatccgaaaggggtgctgacacaatcggcggaagcgaaagccaaggccggaaagtataatgccacgatcgggattgccacctcacaaggcgagtccatgcacttttcccatattcaagagacactgtccgcctataaccccgatgatatctacgattatgctccgccgcagggaaaagagccgctcagacaggaatggctgaaaaaaatgcgtctcgaaaatccttcattagccggcaaagacatcagcacgccgatcgtgacaaacgctttaacacacgggctgagcattgccgccgacttgttcgtcaatgaaggggatgcgctgcttctgccggataaatattggggaaattacaatttcattttcggtgtccggcgcaaggcatccattgagacgtacccgctttttcagcaggatgggcgttttaatgcggcggggctgtccgagctgctgaaaaagcaggaagaaaaggcgattgtcgtgctgaatttcccgaataatccgacaggctatacgccgggggaagaggaagcgtcagaaatcgtcagtgtgatcctggaggcagcggaggccggcaaagagattgtcgtgctcgtagacgatgcgtattacaatctgttttacgatgaaacggccattcaggaatccatcttcagcaaactcgcccaagtgcacgaccgggtgctttgcgtaaaaatagacggcgcgacgaaggaaaattacgcgtggggcttccgcgtcggttttattacgtacagcacaaaaagcgaaaaagcgctgcgcgtgctcgaggaaaaaacaaaagggattatcaggggaacgatttcaagcgccccgcatccgtcccaaacgtttatgctgcgggcgatgcagtcaccggaatacgagaaagaaaaatcgctgaaatataatatcatgaaaaaacgggctgacaaagtgaaagccgttcttgcagaaaacaagcactatgaagacgtatggacgccttatccgtttaactcgggttatttcatgtgtgtccggctgaaagacataaacgccggcgaattaagagtgtcgttgcttgaaaagagaggaatcgggacgatatccattaatgaaaccgatttgcgaatcgcattttcatgtgttgaagaagaatacatcgcggatctgttcgaagaaatttatcaagaagcaaagcagctgcagaaacaggcggaaatatcaggctgacaaaaaaaggagggggataccctcctttttctatgcttacatcagctcttcatacgttttcatctcaatcccgtcacaaaaatcgggatgcgccgcacaaacggccagcttatattcctcgtccgcatcatatgtgcggatgaaacaaggttcatgtccgtccgggagctcaatggacacatggccgtcgtctttgaggcggacgctgaatgaatcaagcggaagggaaagcccttttccggcctgcttgataaagctttctttcatcgaccacaggaggtaaaaataatcggtctgctgatcggggtgtttcgcttgcagatcactgtattccgtcggcgaaaaaaaacgtttggcgatatcaatcgtgccgggcttcattttttcaatatcaatgccgatcggttttgaatcaacggcacacacgatccagcgcccggagtgggaaatgttaaagtgcatgtccggaagcgcggggatgtacggctttccgtattcctggacgctgaatgaaatcgcggccggatcaagtccgtaagccttcgccgcagcggtgcggatcagcatgtcgccgatcaaggtgcggtgagcatcctccttatggtaaaagcgccggcatttttcccgcttttcggcggacacggccgccatcatccgatcctcttcccctgcagaaagcgggcggtccatatatactccgtaaatcttcatgtccagatcctccgtctgaaaatattgtcaaaaccatcctaccatatcagacgaaagctgtccgaaaataaaaaaacaaaaccgtttcggctttgtttttaatgaacggacgttgcccgcccggagatcgcgtatgttaacagtttagaggactgcggcaaagaaaaacgcagaatcagccccgtcaaaacagccgtaataatggttccggcgccgatcggtccgcccatcacccaggctgcggcaagaatcgtcagctcaatgccgttccgcacccattgcacgttccagcccgttttttcagatatcagcatcatcagagagtcccgggggcccgcgccgagccctgctgatacgtaaataccgacgccgcagccgatcagcagcaatccgatagaaaaaaacacggccgctaaggaaaaagcgtgcgcctcaggaagcagaaacgagaagaaatcaataaacattcccatcagcaccatgtttaagatagcgccgattttcgggagcgtcctcgtgaacaggcaggttaaagccacgatgaccgcgccgaccaagatggaccattggccgacagatagcccgaaatgctgaaaaagcccataatgaaaggcatcccaagggctgatgccgagagcttttcctttaatggttaacgataccccgaaagacaaaatcaacagaccggcaaaataaaacgtccagcgcatcaagaattcccgcttcaaagaggtcccttctttcataacattcattaattgtcattgtagcataaccgcccaaaaaaagaagaagcgaaatcagtgtttcgcttcttctccggctcctacaaaggattcagtatacgatttaaaaaccgctgcgtgcgttcttctttcggcgcggaaaaaatctgggccggcggtccttgttccacaatgacgccgccgtcaatgaagatgacttcatcggccacttcctgcgcgaatttgatttcatgggtgacgacgaccatcgtccagccttcgttcgccagatccttaatcactttgagcacctcgccgaccagctccggatcaagtgctgacgtcggttcgtcaaacagcatcagctcgggctgaatcgcaagcgcgcgggcgatgccgacccgctgctgctgaccgccggaaagctggaacggatataaatccattttgtctttcagtccgactttttccagaagctctatcgcttcttttctgacttgctccttgtcgcgcttttgcacttgaacgggtccttccatgacgttttcaagcgccgtgcggtgaggaaacagatgatacgcctgaaagaccatgcctgatttgcggcggaggcggagaatatcagcctgcttcacttttttggagaaatctattgaaaaatcggagaatgccagctcgccgcgattggggatctcaagcgcgttcagacagcgcagaagcgtcgtttttcctgaaccggacggtcccagaatggcgatgactttccctttttctatctccatatctatcttttttaaaatttcattctgtccgaatgatttatttaatcctttgacggaaagcatatcgaaacctccttatttggccacataacggtcgagacgccgttcgatcacatgctgtacgattgacagcaagaagcagatgatccaataaataaaggcggcttcaatatagatgaccaagatttgatcaaggttttgcgcgccgatttcctgcgcttttctgaacagctccgcgacgagaatctgtgacgcgagagatgtatccttgatcaggctgataaatgtatttgataatggcggaatggacacgcgaaacgcctgcggcaggatcacgcggaacaatgtcttgcgataggtcatgccgatcgtataaccggcttcccattgccctttcggcacggatgaaatagatgcccggatgatttcagaagcataggcgcccacgtttaatgaaaacgcgatgactgcgcttgggaaagggtccagcgtaatattaaatgtcgggaacagataaaaaatgatgaacaattgaacgagaagaggagtgccgcgcaccgctgatacgtatacgctgaacacccatctcaatggtttcatatttgacattctggcgagcgccgtaatcagcgcgatgatcattccgaaaataaaggaaagaatggtaaggggaatcgagtaatagattcccccggaaagaatcggccagaatgactgctgcaccaaatcccacggaatggctgttgcaatcacgggttccggcatgttacttagaaacatcttcgccgaaccattttttcgctattttagaaagagtcccgtcctctttcatttcttttaacgctttgttgacgtgagtcacaagttcgccgcttccttttcggaatgcgaaatatgtctgctgcggctggcctgcttcaaacgcgattttcacgtttttattgccggacgtttttaagtagttcagtacggcaagcttatcgttgtaagtcagatcagcgcggccctgctgaatgagctgaagggattgcgccatgccttcaacgccttcaattttcgcgccggcttctttcgctaatttattgtaattgcttgttaatgactgagccgctgtttttcctttgacatcagcctctttcgcaatcgtgctgtcttttttcgtcacgacgactgcatttgacgttgtgtatttatcagaaaaatcatattggttctcacggcctgttttgccgacttggttggcgacgacgtcaaaccgtttcgcgtttaaaccggcaaacatgctgtcccattgtgtttctttaaagtcagctttcagaccgaggcgtttcgcgacttcttgaatcacttcaacatcatatccggtcagtttgtcagtctttttatcatggaaggtaaacggttcgtacgttccttctgtaccgacggtcagtacgccttttttcttgacagaagcccaaagatcgccgtcttttgacttagatccgctgtcctgtgagtttccgcaggctgcaagcattgcgatgctgaccatcatgaacaaagcgaataatgcttttttcatcttctttattccccacttttctgagtagttttattgagaaaaaatagctcccaattgtaaaggataacttttttttagtatgagtcaagtaattggttttcataagcgggaattcatcgtgttccggatcaaaataattccaaaaactgtctgacaggcttcggcaggtagctgtcttttctccagatgacggccggtgtcatgacaaacgggttgtcttcgatgataaccgttttgacatgcgagcgcatatggacgggaatcatcgtcaaaggcagaattgtggcgccgaatcctgatgatacaaggctcaagagcgtcgcggagtcatggcattcacaaacaacctggaggtcgagaccgtactgttcacaaacttggaggacttggtcatacacacctcttccattgacggtgcgcaaaaggatcagaggcaaagaggcgatgtcattcagtttaatcgtttctccgcacagtcgttttgaatgctcggacagcaccaatacacacggaatgtcttcaagctccttcgattcaatgccgtcgtttttaatcaaggtggtggtgacggcggcgtcaatctgccgggtttccagaagctccagcagtgagacgggttcatcttcccaaatgttaaaggtgagatgcggaaaccgctctttcatctgtgacactttctcaagcatgagcgctgcgcagtaaatggttgacccgacggcaagtgtcccggccacctcctccttcagctcttgtacctcgattatagcgtcctcaaacttatgaagaatctctttcgctcttttcaaaaagacgtttccttcatatgtgagggtcatttgtttctttttattgcggtcaaacagaatgacgcccaattcttcttcgagctgtttcaactgtcggctcaaaggcggctgtgccatatggagctttttggcggccgtcgtgattttctgctcttgggcaatggtgatgaaataacgcaattgccgaatatccatgagaacgctcgctcctttcttttatacctttaaggtatgatacatagatttaacgaatatttttcatatggatatatcaggagtatgatggatttgacaccacatttcaagcgtaaaggagggtcaatatgaagctcgtcatcggaatgaccggggcaacgggagccatattcgggatcaggcttttagaatatttaaaagccgcggagatcgaaacccatcttgtcgtgtctccttgggcaaatgtcaccattacacatgaaaccgattatacgttaaaagatgtcgagaaactcgcatcctatacgtattctcacaaagaccaggcagcggcgatttcaagcggttcgtttgaaacggacgggatgatcatcgctccgtgcagcatgaaatcactggcaagcatccgcaccggaatggctgacaatctgctgacaagggcggctgacgtcatcctgaaggagcggaaaaaacttgtgctgctgacaagagaaacgccgctcagccaaatccatttagaaaatatgctagcgcttacaaaaatgggttccgtcattcttccgccgatgccggcattctataacaagccggctgacatggatgaattgatagaccatattgtgttccggacgctcgatcagttcggcatccgtctgccggaagcgaaacggtggtacggaattgaaaaacaaaaaggaggaatctgataatggcctatcaggattttagggaatttctcgccgctcttgaaaaagaagggcagctcttaaccgtcaacgaagaggtaaaaccggagccggacctgggcgccgccgcgcgtgcagccagcaatctcggggataaaacccctgcgcttttgtttaacaatatttacggacatcacgatgcgcaggtggctctgaatgtcatcggctcgtggccgaatcacgcgatgatgctcggcatgccgaaagatacgcctgttaaagaacaattctttgagtttgccaaacggtacgatgcatttccggtgccggtcaaacgggaagaaaccgcgccgtttcatgaaaatgaaataacggaagatatcaatctatttgacatccttccgctattcagaatcaaccagggggacggcggctactatttggataaagcgtgcgtcatttcccgcgatcttgaagatccggacaatttcggcaagcagaatgtcggcatttacagaatgcaggtaaaggggaaagaccgcctcggcattcagcccgtgcctcagcatgatattgcgattcatcttcgccaagctgaagaacgcggcgtgaatcttcccgttacgatcgcgctcggctgtgagccggtgattacgacggctgcatcaactccgctgttatacgatcaatccgagtatgaaatggccggcgcgattcaaggggagccctacagaatcgttaaatctaaattgtctgatttagacatcccttggggtgctgaagtcgttctggaaggagagatccttgcgggagaacgggaatacgaaggacctttcggtgagttcacgggccattattcaggcggccgcagcatgccggtgatcaaaatcaaacgggtatatcatagaaacaatccgatttttgaacatttatacttaggcatgccgtggacggagtgcgattatatgatcggcattaatacgtgcgtgccgctttaccagcagctgaaggaagcctatccgaacgaaatcgtcgccgtgaatgcgatgtatacgcacgggctgatcgccattatctccacgaaaacgcgctacggcggatttgccaaggccgtcggcatgcgcgccctgacgacgccgcacggactcggctactgcaaaatggtcattgtcgtggatgaggatgtcgatccgtttaacctgccgcaagtcatgtgggcgctctcaacgaaaatgcatccgaaacacgatgcagtcatcattcctgatctgtccgtccttccgcttgacccggggtctgatccggcagggatgacacacaaaatgattcttgacgccacgacgcctgtcgcgccggaaacaagaggccattattcgcagccgcttgattccccgctgacaacgaaagagtgggaacaaaaactgatggacttaatgaatcaataagaaaggatgagtttactatgaaaacatgcccgcgatgtgaatcgcaaaaaggagaaaccgtcagccaatcgccggtcaaaggcgcttgggaaatataccaatgccaaacctgctttttcacatggagatcctgtgaaccggaaagtatcacgaatccggcggcattcaacccggcatttaaaatcgatccgaaagaaacagagacggccacacatgttcccgctgtcccggaaagaaaagcgtaatgctgacggagcacttgccggaggcgctttacgcgcttttagacggaacggaacttgaaaaaaagcagcacgacgcatttgtgctccaatccgtgacaaaagaaggccgtccgcacgcggccatgatcagcgccggtgaaatcgcggccgtgagcagaacaaatctccggctcgccttatggaaaaacacgacgaccgtaaaaagcctgctgcattcgggacaagctcttttcatcgcctggcacggaggagccgcatattacgtcacattggaatgtaaggcgcttccgccgttgaaagaggcgaaacacgagcgggaacggttcagctgccgcgtgatcaccgtcaaggaagatcgggcgaaatacgcggatctgacatcaggaccggccatccagctccacgaaccggaagatgtcctgaagagatggagagaaacacttgaggagttaaaacgatagacgcacaaaaaaagcctgcggacgattccgcaggcttctcttttattgtacgcctttcatcgcccgtttaatgacgggagacagaagaattaaaataataccgagaatgatcgaaacaagaccgattgagccgaagtaggccgcttcagaaatcttatcaaacaaaccgactacttttgcgttcagggcttgaccgcaggcgtttgttaaaaaccacatactcatcgtctgcgctgagaaagctgcaggcgcaagtttcgttgtgacggataaaccgaccggtgaaaggcaaagctcaccaagcacaaccaaaaggaagctgagcacaagccaaagcgggctcacaagctcgccgcttccgcccataaccggaagcaccatgactaaaaatgataatccggcaaggataatgccgatcgcgaatttaatcggtgttgaaggctggcgtttgccgagcttcatccagatccacgcgaacaccggcgcgaaaataacgatgaataatgggttcagagactggaaccatgaagactcaagatgcatgcccgcaaaggaaagtctcgtgcgctgatccgcatataaagctagaatcgtcgcgccctgctcctgaatcgcccagaacattgccgctgcaataaacagcggaacataagccgcaagccgtgatttttccgttttcgtcgcttttttgcttgtgaacatcacgataaagtaaataaccggaatgacaatgccgaggatactgacggtgtcaatcacacgctggatcgtcagccagccggtttgaatcagaacaataataacggctgctgcgatgaccactccgattcccgtgccgatcactgatgatttagaaatcggattcggtacattggagcctgctttgccgaggtatttctttctcgttagagcgaaaacaatcagtccgaggaacataccggccgcggcgcatccgaagcctaagtggtagttgtacttctgtccgagtgttccgacaattagcggcgcaagcaatccgccgaggttgatccccatgtaaaagatgctgaaacctgagtcgcggcgctcgtcttccttcgtatataaatctccgacaacgctggatacgtttggtttaagcaggccggttccgataatgatcagagccatgctggtaaaaaacgccgccgtgctgccggggaaggcaagagcgatgtgcccgaacataattaaaattccgccgtaaaatacggtgtttgccgtgccgaatacccggtcggccagccatccgccgatgacgctcgacatatatacgagagatccgtatatggacatgatggcaactgcggtcgttttatcaaagccgagaccgccatgagcgacttccgtgtataaatagtaaagcaatatggctctcataccatagtaggagaaacgctcccaaaattcggtaaaaaacagtgtgaacaagccgcggggatgaccgaaaaagcctcgttgcggcacagtttctgttatagattccttatcaatagatgccacctgagccaaccctttcttaaaaaagtgtattacaaaaatcatattcttatataatacttgtgtcaatataatttatactgaattcaaaaaattccagaatgaaaagatattaaaacggtgaatatagacgaattttcctgattccaatgacttattttgttatattatctgactaaactatctttataaacttttttaataaaatttaaagtatgtacaggcggagcgggatatggcggaataagatgacaataagagaggaaggaggagattatcacttgccgaatcgtatattggatattacggattgcggtgtggcggcagacggaaaaaccgatgtgacgggcgccatcaaccaatgcttggccagagccgtcagcgaaggctgtcatacggtgttttttccgcccggaacgtataaaatcaacggcacgcttggcggggacaaaagccagccgtttcggaacgccgggattaacgtgccgagccatctcaccatcgttttagatccggaatgcacgattaaagtggcgccgaacagctcctggggctactcggctttctatataggcaggcgtgaaaatgtcaccatcaccggcggccggatcatcggggaacgggatgaacacacgtataccaatgtccctttgcggtcgacccatgaatgggggtttggaatctgtattgaaggcagcagcaatgtgctgatcgaaaatgtgaagatttcagattttacgggagacggtataattgtcagcccgctcgggttaaaaacaaacagtgattacgaaacttcagaacaggtgaccatccgccgctgtgagatcaggcagtcaaggcggaacaacatttcaatcaccggctgcaataccgttacggtggaagaatgcgtgattgaagacgccgggcaagggaacggaacggctccgaaattcggaatcgatattgaatcgtacggagaaggcgatattgattatgaagaagctcttcatattacggtccgcaacaacttcttttccggaaacgccgcaagctcagtcaccaattttaacggatataatgtgttaattgaaggaaatcattccgataacacaatcagctacgggtatggggcgcataccgtcattacggggaatgtcttctttcggtcagacggcggctcaaggaccgcagtcgccggacaaggtgtgtcacaaggacaggacagcagcagtgccgtcatttccaacaatctgattaccgggttttccaccggaatagatgtaaggggaaaaagcgtcctcgtcacccacaacaaaattaatcaatttgaaaatacgggcatttccgtctatcaggcagaagatgtgaccgttgacggcaatgtcattgaaaacggacgttccgaaacgagacgaagcacggggatgcgggcgacgctttcggagaacgccgtctttacgaataacactctgaatcaggtgacagacggaatcagcatgtcggccggcagtatcattgtaaaacaaaatgtgctgaaatcgttcagccggggcatatgggtcacaggcggaaatgccgttattgaaggaaatacgctccttccgaatgcgtatcagggcgccgcggagtcctatgccgtatctgtgacaaatgacgccggggctgtcatcaaaggcaatctctttaagaactataaaaactatcccgtattcagttcaacatcctcgggaacctctgtcatcagcaaccgctttgaatcatcaccgcttatcgttaccgtgtatctgaactcaggcacgcatgaagtcatagacaatacgctcacgatcaaccgaacagcgggcagcccgatcggcatctatctgaacggagcctccaattccctcgtttcgggcaataccatcaacaacctatccgccgcttctgcttccgccatccaaaccagctcctccgcaagtactaaaatcatcggcaaccgcattatcaaaggcgtcattgtgaagcacgcgacagatacggaaagcggaaatatcgtcatctgagaacaatctgcgccggaaaaataaaaagaacacatgaactccgagagaaggaggaatgtgttcttttttgacacaatacagccttgcgcctgtcaggcatcttttttacctgatttatataaagcgatcatttctctgattaaaaagagggcgaataaaaacagcatcagccattctgagaaggtggtcaatttaaaagcggacaggttgttttgaaccgctccatagaaactgaaaccttgcagcatatccaccgttactgaaatgatcagacaggcagtcagcaaaaagaatgaaacccctaatattttcatgcgcatcactctccctttttatccttttcgattacgcagaacttatacagactttccgccgtgcataatcttttgccgtacaggaagaatatgaaaaaaacgaggaaaggttttttgcgatatgccgccattttttaagcagaggaaacaaaaaaaagccgatcaaaacgaccgtgacaatgaaggcagaaaagaagcggacagccagccggacaaagagcgggatgagccgatctccctcagcttaaagcaaaatatgaagaagctgtctgagaggttcggcaacagtgccgatgtcgtcatccgccggctgaaaatcggaaaagaagagcttccggccgcaatcgtgtatatcgccggtttggtagacgaacagcttgtcagccaatcccttctggaggatttaatcgatatcccgtccgttcagccggaacaagcggtctgcctgatatacgataaaacgcttgcgatcggcggggtgaaagaggaagaaaaatggaaaagcctttatgccgggctggtggcgggcagcacgctcatttttgtcgacggggctgacaaggcgctgatcgccagcacggaagggggagagcaccggtccattcaagagccgagcactcaggtctctttccgcggcccgcgccagggattcactgaatctctgcaaaccaatatttccatgatccgcaggtatgtaaaaacgcctgatgtatgggttgaaaaaatggagatcggacacgaaacgaatacggatgtcgcgctgatgtatattaacggaatttgcgataaaaagctgattaaggaagtccgcaagcggctgaagcacattgacatcgacagcatcctggaatccggctacattgaacagctcattgaagacgcgccgttttctgtgttccccaccgtatatcatacggagcggccggacgtcgtggcggggaatctgctggaaggacgatttgcgattatcgtggacggaacgccgttcgttctcatcgcgccggccttatttattcaattttttcaatccgttgaggattattattcacgatttgatatcgccacaagcatcagggtgctgcgggttttgattttcttcatttcactggtggcgccggggatttatgtggcggcgacgacctttcaccaggaaatgattccgacgcagctgctgattgtcatcgcggctcagcgggagacggtgccgttcccggccgtgattgaagcgctgacgatggaagtggcttttgagattctcagggaggcgggtgtccggcttccgagagttgtcggctccgccgtttccatagtcggagcgcttgtcatcggccaggccgccgtacaggccggcatcgtctccccggccatggttatcgtcgtcgcgctgacggcgattgccagctttgcgaccccggcttttgacatggcgatatccgcgcggctgatccggtttctctttattctgtcagcggcggtcatgggattttacgggctgattctgggcattatcatgatgttcgtccatctgtgcggcctgcgttcattcggttttccgtatatgtccccgctcgctcctttgaccccgggcgggctgaaggattccatcctccgcgctccgttatgggcagatgaaaaaaggccggaactgctcgtgcaggaaaacaacaggcgccaaggggaacatcaaagaccgaaaccggagacatccagagggatggttaataaagatgtagaagagggcgacggtaatgaaaagacgtaaatggatacttatcctttgtacgatggtttcccttatgtttgtatccggatgctgggataaaagggagctgactgatttggctgtgatctccgccatcggtattgaccggaccgaaacgggaaaatacgtccttcacttgcaaattatcaatccgggaaacgtggccggcggtctgcagggcggcggagcgggagaccggcctccggtttccgtctattcggtgtccggagacaatatgacggaagctttgagaaaaggctcgatgaaagtgtccagaaggctctattttgcgcatacgaatctcgtggtgttcagtgaaaagctggcgaaagaggaagggctcagttttattctggacaatcttgaccgcgacaccgaattcaggacgaccgcaaccgcggtgatcgcgcataattgcaaggctgaagacattattaaagtgctgacgccgattgataaaatcccttccaataaagtgaacaagacgctcagcttcacgcaggaacaatacggcagagtcattaaaaccagccttcaggacgttctgattgatctcgcttctccggccgggtcgccgtttattccgggttatgaaatgcacggagacgataaagccggtcctacgatggaaaatacgcagacgactgaaccgaaagcagtgctgtcagcggacggactggcggtgttcaaaaaggatgggaggctggattactggattgaggatgacgacagtgtgggggctgtatggctgctcaataggatcaagcatacgttcatcaatgcggattggaagaatgtgaagcacgcaatcagtctgcaggtcacccgccagaatacaaaggtgacggccacttttccgaacggaaaaccgcatattcacgtgcatgctcaggtcgaggggctggtggacgctgtcagataccctttccatctgtctgatccgcaagtgctgatgacgatgcaaaaggcgctcagcgtgcagcttgacaaagatatcaccaaatcaattgaagatataaaagcccgtaagaatgacttcgtcggcttcggagacctgatctatcggaagcatccggacaaatggaaaaagttcaaagggaagtgggatgaagaatatttccccaatctccccgtagatgtcaaaacggaagtcattatcagaagaacgggcttgcggaataatcctctctcagacaagcttgagcatgattgatttgaggagaaaggagcgaagcgtatggaaaatgcgaaaatcggcacgcgtcagctgtttattatgatcattttgtttgaattgggcagttcgttattgatcccgccaggcacgatggccgggcgggatgcatggctgtccgtgcttctcgggtgcgttatcggtctcggacttttctacgtttatcaggcgctgtatcaattttttcctgagtcttctccgagagattacatgaacgaactgatcggcagacatctgagctgggcggtctcgcttctttatattctctatttttcttatatcgcggcccgcgtattgcgggattttggcgaaatgcttgtcaccttcgcctaccaggacacgccgcttttaattgtgaatgccatgctgatgatcgccgcgatatttgcggtcagaaagggtattgaagtgatagcgagagccggcgagctgctgtttggcattatgtattttctgacagccgtcgggctgatcctcattatcagctcaggcacgataaacctcagatttctccagcccgttttagcggagggtgcaggaacggtcatttattccgtgtttaaacagacgatgttcatcccgttcggtgaattaatcgtgtttgtcatgattttcccttatttaaaagatcggaaaaaggtgaagaaaaccggatttctggcgattatcatcagcgggctgtttttggcgatgtcagtggcgattaatatttgtgtgctggacgtcaacttaatgctccgctctcaatttccgctgctgagcaccatacagacgattaaagtagaagagtttttagaccggctggatgtctttttcatgctcgtgctcgtcatcggcggttttttcaaagtcagcctttttacatatgcggttgtcgtgggtgtgtccacgctgtttaaagaaaaaaatccgtctcagctggcctttccggtcggattgggggtgctgattctctccatcagcatcgcaagcaatttttcggaacacatgaatgaaggcttaaacattgtgccgatctatattcatcttccgtttcaagtgctgtttcccgttttgctgcttatcattgccgttattaagaaaaaggtcaaagggaccgtctatacagtttcgaagaaataacccggacggtgcgccgggttatttttaaaatcatgatttttgtcttaatgcattgacaaacttgcgtgacaattgtacattttgatttattcttataaaattactaggaaatataggtttagtggtgttaatattttccgaaccgtatttcagaatagaaggagatccatcatgacaaagaaaaaagaaatcaaactcggtgtgtttctcgcgggcaccggccatcatgtcgcttcttggagacatcctcaggcaccggcggacgcgagcatgaatttggattatttcaaagaactggcgaaaacggctgagcgggggaaattggacatgctgtttttggcggacagtttatcaatagacggcaaatcacatccgaatgtgctgacgcgctttgagccgtttacgctgctgtcggcgctcgctcaggtcacatcccgcatcggtctgacggcgaccgcgtctaccacatacagcgaaccgttccatatcgcgagacaatttgcatcgcttgatcatctttccaacggccgagcgggctggaatgtcgtcacatcttcgattgaatcgaccgcgcttaatttcagcggcgaaaagcatcttgagcaccatctcagatatcagcgcgcggaagaattcgttgaagtcgtcaaaggattatgggattcgtgggaggaagacgcctttatccgtgacaaagagtcaggagcatttttcgataaagaaaaaatgcatgaattgaaccataaaggaacatatttctccgtgagagggccgttaaatgtcgcccgcacacctcaagggcgcccggtcattattcaggccggatcatcaggagacggaaaagcgctggccgccaaaacggcggaggtcattttcaccgcgcaaaatcatttggagtccgcgcaggaattctatcaatctattaaagaacaagcggcttctttcggccgtgatcctgaaaaaatcgcgatcatgccggggatatttcccgttatcgccgataccgaggaagaagcgcaggcaaaatatgaagagctccaagatctcatcattccgtctgtcggcctgaacattctgcaaaactatctgggcggcgtcgacctttccgcctgcccgcttgacggcccgctgcctgaattggatgcggatgcgtcgaatgccgttaaaagccggttcaagctcgttcaggagatggccaaacgcgataacatgaccatccgcgagctgtacaaatatgtggcgggttcaagaggccatcatatctttgtcggaacgcctgaacagcttgccgataagatggaagaatgggtcggaaaacaagcttgtgacggcttcaacatcatgccgccgcttttgcctgaaggtctcactctttttgtagacaaagtgattccgattttgcaagaacggggcgtgttcagaaaagagtatgaaggaaccacactcagagaacatttcggactggaaaaaccggcaaaccgatatgccgactaaaggagggctcatcatgtcaagacaataccggctcgcaacggaggcagacgctgatgagctgctttcactgacactgcgggcgtatgaaccgatccgcaagctcggcatcaactttgccgcagcaacggcggataaggagctcgttttgaataacatacaaaaaaacgcctgttacgttttggaggaagacggacggattctggcgacgatttctctgcggatgccgtgggggccgaatcccgggccgtacggtgtccctcatatttggtggttcgccgtcgatcctgaaaccggaaaaaaagggacgggctcagacatgctggagtggctggagaacacagtgctccgcgatacattaaaagcgcctttcgtgtcactgggcacagcggacaagcatccgtggctgatcggcatgtacgagcggaaaggctacgtccgcgcaggcgaaaaggatttaggaaaaggccacatcaccatctatttaaaaaaacaattgcaggattaacattttaataggaaaaggcgggatttcaatgaagaagaaaacatgggctttgctgctgtctgccgcgcttttggcggtcttaacagcatgcggaaacggaaaagaaagcgaaggcggcgataacgtgctgcatgtcggcgctacgggacaaagctatccgttcgcatataaagaaaacggcaagctgacaggctttgacgtggatgtaatggaagccgtagcgaaaaaaatcaacatgaaactggactggaagctgcttgagttcagcggactgatgggcgagctccagaccggcaaactcgacaccatttcaaaccaggtcgctgtcacggacgaacgcaagaaaacgtataacttcacagaaccgtattcgtatgcgggcactcaagtcgtcgtcaaaaacgataacaaagacatcaaatcagtcaatgatctgaaaggaaaaacagtggcggccgttctgggctcaaaccacgcgaaaaaccttgagagcaaggacccggataaaaaaatcaacataaaaacatatgaaacacaagaaggtacgctgaaagacgtggcttacggacgggttgacgcctatgtaaacagccgcagcgtcctgatcgcccagatcaaaaagaccggtctgcctctgaaattagcaggagacccgattgtctatgaaaaagtcgctttcccgtttgcgaaagatgcggctcacgataaaatccgcaaaaaagtaaacaaagccattgaagacctgcggaaagacggcacgctgaaaaagctgtctgaaaagtactttaacgaagatatcacaaaggaagcaaagcaataagaaacggcggtgaaaatcgagaatgaacagcattgattggggatttatgttttcagcttttcccgcgttaatcgaagccttgccgatcacattactaatggccgtcgcggccatggtatttgccgtgatcggcggccttatattagcgcttatcacaaaaaatcgtattcctgtgcttcaccagctgtcaaaggtgtatatttcatttttccggggcgtgccgacgctcgtgcagcttttcttaatttattacggcctgcctcagctctttcccgggatgagcaagatgacggcgttaactgcggcgattatcgggttaagcctgaaaaatgccgcctacctggctgaaatcttccgcgctgcgctcaactcagtcgatgaggggcagcttgaagcctgtctgtctgtcggaatgacaaaatcccaggcgtacagacggatcattttcccgcaagccgtcagaaacgcgcttcccgcgacgggaaatacgtttatcggcctgttaaaagaaacatcgctcgcttttacattaggtgtgatggagatgttcgcccaaggaaaaatgtacgcatcgggcaacctcaaatattttgagacgtatttagccgtcgcggtcatgtactggattcttacgattatttacagtgtgctgcaggatctgctcgaacgggcgatcagcaagccttatcgcacataggaggaggctcaggatgatacaagtcagacatattcgaaaagcatttaaagatcttaccgtacttgacgggatcgatcttgagatcaaaagcggcgaagtcacggccatcatcggcccgtcaggctcgggaaaatcaacgctcctccgctgtctgaatctgctggagcgcccggatgacggcatcattgaaatcggcgatgcaaagctgaatgcagcgtcctattcgcgcaaagacgtacacaagcttcgccagcagacggcgatggtgtttcagaattacaacctgttcaaaaacaaaaccgccctgcaaaatgtgacagaggcgctgatcaccgcgcaaaagaaaccgaaaaaagaagcggaacagatcggtatggacctgctgcggcaagtcggtttagaacacaaagcggacagctacccgattacgatgtcaggcgggcagcagcagcggatcgggattgcgagagccttggccgttgatcctcacgcgattttactggatgaaccgacttcagcccttgaccctgagcttgtagcaggggtgctccaagtcatcaaatcaattgccgaaaaacagacaaccatgatcatcgtcacgcatgagatggcttttgcgcgtgaagtagccgacaaagttatttttatggcggacggacgcatcatcgaacagggaacaccggaggagctgtttgacaatccgcagaacgaacggacgaaaaaattcattaagcaagtgggagagcctgccgaacttgtctaagaagggaagaagaagaaatggcaaatgaaacgtatgaatcattaaacaaacgtttaatcaatatccgccgcgaccttcatgaacaccctgagctgtcaggcgaggaattcgaaacgacgaataaaatccgccgctggctggaggaagaaggaatcacggttcttgatgtgccgaaacttcaaaccggagtgatcgctgaaatcaaaggagataaaagcggccccgtcatcgccgtcagagcggacatcgacgcactgccgatcgaagagaaaacaaaccttccgtttgcttcgcgcaacagcggcgtgatgcacgcatgcggccatgatttccatacggcatctatcctcggcacggctttcttattaaatgagagaaagcatgagctgaaaggaacggtgcggtttatttttcagcccgcggaagaaatcgccgccggagcaagacaggtcattgaagccggcgcgcttgacggtgtatcggcgatattcggcatgcataacaaacctgacctccccgtcggcacggtcggtctgaaagaaggcccgcttatggcgagtgtcgaccgctttgaaatcaccgtgaaaggaaaaggcggccacgccggaatccccgacaacagcattgacccgattcaggcgacagggcagatcatcggcggcctgcaatcgattgtcagcagaaacatcagctcgcttcacaatgccgtcgtcagcatcacaagagttcagggggcagttcttggaatgtcattccggaccatgttgaaatggaaggaaccgtccggacgtttcaaaaagaagcgcgggacgctgttccgaaacatatgaagcgggttgccgaaggaatcgcggccggattcggggcagaggctgacttccgctggtttccttacctgccgtcagtgatgaacgatgcccgattcatacaggcggcggaacaaacggctgaaagcctcggacttcaaaccgttcgggcagaacagtcgcccggcggcgaagacttcgcattatatcaagaaaaaatccccggcttcttcgtctggatgggaacaaacggaacagaagaatggcaccatccagcctttacactcgacgaaaaagcgcttccgaaagcggctgagtttttcgcccggcttgccgtcaatgtattggagcagacggaatgaatacggaaaatctgacggccggacttgctcaggccgtcatgtcgtctgtgccggaaacatccgccgaagcgatgaaagaagcgcgcaaaggactgcttgattttacagcggctgcttttgcggggagacgggatacaggagttgaaaagctggtaaaactggccgaagaagaaggcgggatgccgatagcgccgcttatcggcagaaatcaaaaaaccacgccgtcccaatccgcgctcattaacggcttcatcgcacatgcgcttgattttgacgatgttcattctgatgtaagaggacatccgagcgcggtcatcctcccggctttgattgcagccgcatcagccggccggatagacaagagccgttttctcggtgcttatgtgacgggaatcgaagtgatggcgcggctcggcgagtcagctggaagggatcattacgagaaaggctggcacaatacaggaacgttaggtgccatttcggccgcatgcgccgtcggattcgcagagaatctgaatcaaacccaattacagaaagcaatcgggtttgcggctgcccgttccggaggcatgagagtgcaattcgggacagaaatgaagccgctccacgccggcctggccgctcaagccggggtgttcgccgtaaagcttgcaaaggccggtttcggcggctcagctcatgcgctcgacggggagaaaggttttttcggactgtacggcgatcttgaacgggcagaaaccctgcttgtaaacgggtggggaaacccttggcggatcgtgagtccgggactttggtttaaggtttatccgttttgctcggcggcccatcatgcggcggacgccattctcaagctgaaggccgaacatggtctcactttcggccaaacggaacggattgacgtgatttatccgccgggcggggacgccgcattgacagaacggcgtccgaaaacaggcgaagcgggtcggttcagcgtagaatatgtgatcaccttagctttgcacggtaaggatttttcagttgaacatttcacatccgagccgattccgcaatcccttcaaaaaggatttgagcggattcaccgcagctgcgatgaccaaattcagccggctgacaacgccgttccgaagggccgttttacaattgtacgggtcacggtttccggcggtcatgtctatgaagcacgtatcgactgtccgaggggagcgccgggaaacggtctttctgaaaaagacattgaagacaagctccggctcgctttgccgggagaagagaaaaaggcggaagaattgatcaaagcagccggacaatcaaatattgaccgttatttacagctgatataaataaaaagagcgaggggatgcagccctggctctttttacgttcacttctattgaatagggggatatagggtgcgcccctgtctgcgctggcaggggcgcggtatcaggaaacggccgtgccgttttctttgaccgtgaaacttcctcttgataagcggatgttgatatcagacactttggcaatttgttcgtcgtgcgtaaccatgatgacgcatttgccgtctttatgcgccagatcctgaaagagccggacgatttcctttgacgtatcctcgtcgaggtttcccgtcggctcatccgcgcaaatcagatccgtgtcacagcagaaagcccgcgcaattgaaacgcgctgctgctgtccgccgcttaatgtcagcacccgctgacgggcctgctgttcggtgatgccgactttatccagcatgctgagcgcggacgcatctttgttgttctccttagatccggtaatctccatcgcggttgtgacgttctggagcgccgtcatatacgggatcagatgatgagattgaaagacgatagagacatattgatttctgaatttggttaatccgattttgaagatgtcttctccgttataaaggatgcttccctctttaggtgtgtcaaggccgcccgccagagacagaaacgtggtttttcccgttccggaggcgccggcaattgtataaaacttccctttttcaaagctgatcgttatatcctgaaacagcggctgtgatttatcttggtaccagtagccgatctgttgaaaggttaataggctcattatgctgcctcctcttattcctgcttggtcaggatcgttttagggtgaagccgcatgactgatacagacggcagtaatgtggcgatgacggcaattgcgacgccgatcccgccgagaatcagaaggtcattcagcgaaacgtttacctgcattgtactgatgacatctgcaccggatgaatgctgaccgaacatgccgtctccccgcggcatttctcctccgccccagccgcttgtttgctgctgggaatcatcggctgagctgacctgctgggaaagaagctgatttccgagctgattcgccacaaggctgcccgtgacggatgcgatcccgatggcgataaccgcgacaatcagaatttccgttaagaattgtccgatgagcttccagcgcttttcgccgatcgccatcaagacacccatttcatacttgcgttccctgatcgacatcatcacgatcaatccgagaatgaccgcgcccgcgatggatacaaggtacaccacgtttttagaaaatgacgcgacattttcaatcgggccggccatttgctgatacacctgatcatttgtcgtcagcgtgtaggttttatcatctatagatgtttttttcgcagccgcaacgaatgagtcaatatattttgcatcatccatataataaacggctgagctgattctgtttttgttatcagacccttttaacgccgcagctgcggtgtaaggcgtatagattttattgtcagggtttaagaatgaaaaatgctctgcctgatcgtctcctgatgatgttgttttataaattcccacaattttaagctttgtactcacagaatcatccgctgctgaggaaactgtaatggagccgccgaccttcagcttgttttgatctgccagcgtttcattgatcactgcgacttttgcgtccgcatctgtttttgtgatggcgcggccatcagtgatttttgagctcccgcctgtgaaatcatcaagcagcgccgtagagagcacgccttcgaccgaaatatccgctgaaatcatctgtcttccgccgccttgaaaacggcttccgccggaactgttatcggctgattcgtctgagctttttatcgcgtcaaagctttctgcgtttgctgacgctgtcgtgaggaagttgtaatttttaacgtgctgtaaagatgtaagtttcttggcatccgagacggaaatcggcgttgattcaaacgtcctcttttcaccgtctttttgctgctgcgccatttgcttttggcggtcagcctggagtgtgacgctcccgccgagctgctgccttgccagttcgcttgatttctttgccgctgactggatcgtaagaccggacaggacaaaaatgcaaatcactgaaaacacaaccagctgcaaaaacgtttttcccttttttgccttcatgctccaaaaggctctttttataaagttcatgtctgttcctccgtgtgggtgtcagatcttgtaaaaccagccttctttagaaccggttatccgatatgtatatagtaggagaaatgtatgaaaaaaatatgaacaaactatttccgggtgatgaaataaaaactaacaattgtgaaacgcgaaaatatccgggtaaaatggtgctattataagtaaaagcgtcaagataaacggaggacccaatgaagatattaatgatagaagacaatataagcgtatgcaccatgacggaaatgttcttttttaaagaaggatttgaagccgaatttgtccatgacggagtggaaggctatcagcggttcacggaagaggactgggatttggtcattctggatattatgcttccatctatggacggagtgacgatctgccggaaaataagagagacgagcagtgtgccgattattatgctgaccgcaaaggacacggagtctgatcaggtgatcgggtttgaaatgggagccgacgactatgtcaccaagccgttcagcccgctgacgctagtagcgcggattaaagcggtgatcagaagataccgggcgacggggcaggccgtaaaaagcggcgacttgatcgaaacggcgtgtttttcaatcaataagaagacgcgggaagtgtttctgcatggaaagcctgtcgagaatctgacgccgaaggaattcgatctgctcttttatctcgcacaaaatccgcgccaggtcttttcgagagagcagctgcttgagcaggtgtggggctatcaattttacggcgatgaacgtacggttgatgttcatattaaacggctgcgcaaaaaactgtccagtgaggaaaaaccgtttttatacacggtgtggggggtaggatacaaatttgatgaggattaaatacttatatcagctgctgttaagccatgtcagcattttgattttggcctttttcattatcatttccctgttttcgcactttgtgaaagattttgcgtatcaaaataaagtggatgagctgtcttcttacgcccagcagatcacaagtgagctgaacggacgcgatcttgatctgcgccgcctgtatccgtatcaggacatgttaaaaacgcgcgagaccaggtttattatttttgatgaacatcagcggccttacttttttcctgacgatatgccgccgcgcgagaagctcaaaagtaaagagtggcacatgctgaagcaagggaaaaccgttcagatcagagcggagatgaaccgttttaatacggagggcttggaagtatcgcttgtcgcaaaaccgcttttgatcaacgatcaatttaaaggcgcggtgctgctcgtgtctcccgtcagaggggtcgagcagatgatcagccaggtcaaccgctatatgatttacgcgattatcagcacccttatcatcacgattctgctgagctggcttttatctaaatttcacgttaagcggattcagacattgcgggatgcgaccggaaaagtggcatccggggattacgatatttcgctcaagaacagcggcggcgatgaaatcggcatgctggcgtccgatttcaacatcatggccaaaaatctgaagcaatcgagagagcagattgaccgcctggaaaaacggaggcgccaatttatcgccgatgtctcccatgagctgagaacgcctttgacgaccattaacggacttgtggaggggcttaacagcaacaccatcccggaaaaagataaagagaaatgcttctcgctgatcagtgaagaaacgaagcggatgctcaggctcgtgaaagaaaatctggattatgaaaaaatcagatcccagcaaatcaaactggacaagctcagtctgccgctcatcgaggtgtttgaaattattaaagagcatctcaatcagcaggcggaggaaaaacaaaatcagctgcggattcaggcggaggacggcgtcaaagtgttcgccgattatgacaggctgatccagattctcgtcaacatcacgaaaaacagcattcaatttacgcaaaacggagacatcacgctgcgcgggtatgaaggctataaagaaacggtgattgagatcgaagacaccggaatcggcatctccaaagaggaaattgagcatatatgggagcggttttataaggcggacgtgtcccggacgaatacggcatacggcgaatacggactcggcctgtccatcgtcaggcagctcgttgaaatgcacaagggcacgatagatattgccagcgaaaaaggaaaaggcacgacgtttacaatccgccttccgctgaatacgatacatgaatcatcttgaaaccggcagtcccgtctggctaccggctgttttatcttcactcggaaaattgcgctctgccgaaacaaagtttgcgtgtttttcgggatggaaagacacggaaacgtgataaaataactggtaaacaggtcttggatggggagggtgaaggaatgaagagcgggttaattccttcttcagcagtcgggcagaaaattaacgagtggtatcgatacatcagaacattcagcgtgccggatgcggagatcttgaaggccgagatcaaacaagagcttgaccgtatggagcctgattcaaacttagtgctttattattccctcatggaatttcgccatcagctgatgctggactacttggagccgctggaaaaactgaagatagaagaccagccgaccctgtcggaaattcttgataacattgataacagccaggccggcctcaaagggcttctcgattattacgtcaactttttcaaaggcatgtttgaatttgataaaagagaatttatctcagcgattacgtattataaacaagctgagaaaaaactggccttcgtatcggaccacgtggaacgggcggagttttattttaaagtggccgaagcttattatcatatgaaacaaacgtatttttctttgatacatataaaaaacgcttatgaaatttacgtagagcaggacacatataacgtcaggatcattcaatgccattttgtattcggcgtcaatttaatggatgaaaggcgctttgaacaggcggccaaacattttcagcacgctttgcaaatggccgaaaaagaacaaaaagcgcagcttgtcgggagggcgctgtataacctcggactgtgctactacaatcaggaccgcatcggcgaagcgattccgtactttgaacgggcggttgatacatttgaatcacaaagaatcgtcaattctcttcctcaagcatatttcctaatcacactcatttactttaaactcggaaaaaaagaaaaagcgtcggaatatcacaagcggggatatgaatatgctaaagaaacagacgatcccgtttacacggtaaaattcgaatggctgcaggctctgtatcaggcgaaaccggatgaggaaacaatcagcgcgtgtttccgttacctggaagataaaaatttatacgccgatatagaggatttagcactagaagcagctaaatattactatgaacaaaattgctttaagatttcttctgactattttctgaaagtcgaagaggcaaggaaacaaatacaaaggagtgagggtttgtatgaaattgaaatctaaatggtttgttatttgtttagcagccgccgcgatttttacagtgacaggtgcaggccagacagatcaggctgaattccatgtagctgaaagaggaatgacgtgagaagaaaataacctgaacaaaggaaaagactgcccgggaatgttcccggcagtcttttttttgcgcggccggacttggacagcggcggaaaacaaaagaaaacgccgcaggtcaaaacccgcagcgtcctcatatagacggagtgatgcttagaaaccgccaacataggcagtacctacaataaccaacaggataaataaaacaacgatcaaagcgaaagagctgattccagaatatcctgacatgagcttcacctccatattgtctataccatacaatatgtaaaagaagctgctttgtaagggatattagtggacaagagaaaaaagaggcggtgtcctatgggagtaagactccggcgaaaaactcgtcatacagcgcccgcaccgcttgtttttcctgttcttctttcaccccgaacatcatgctgacttccgatgacccctgattgatcatctcgatgttgacgccggcttcggacagtgctttggatgccctggcggttgtgccgacattatggcgcatcgcttccccgacgaccataatcagcgccagattgtgcctgactgtgacttcatctgcttgaagttcctgcttcagacgggtgacgagcctgtgttccagttctgagtccatctgatcgtgccgaaggatgatcgtgatgtcgtcaatgccggatggaacatgttcatacgtcaatccttcttcctccaaaatgtgaagggctttgcggccgaaaccgatttcccggttcattaaatatttgcttatgtaaatgctgcaaaagcccgtgtcgcttgcgatgccgatgactggcccgttcgtattgtcacggctgctgacgacgcgcgttcctttcgcctccggattattcgtattcttaatctgaacggggatgccggcccgaaaagcgggaatcagcgcttcatcatgaaaaacggaaaacccggcataggagagctcacgcatttcccgatacgtcagttcgttaatctctttcggatgccgcacgattgacgggttgacggaatagacggcgtccacatcagtaaagttttcgtacaggtcggcttttaagccgctggcgagaatggagccggtaatatcagaaccgctccgggaaaacgtcacaatctcatgctccttcgtgtaaccgaaaaatcccggaaaaatgatcaagccttcacggtttctcagacggtacaaatgatcataagactcagggagcacctgagcgcttccgggttcattcgtcacaaacagccccgcttctttcgggcttacgtattcggctttcacgccctgccggcggaagtaggccgcgatcagcttcgcgttgttgtcctcgccgctcgctttcaccgcatccatatactgatcgggattggctttgctgctgtttaagagagcgaataggtcactgcggattctttctataatagagaaatccaggttcagctcacgcgcgatggcggcgtaccgttcaatgaccggttcggcaagctcgggcgctgcaccattttgcaaataatgctccgcacagcggattaacagatccgtcacctttgtatcgtccgagaagcgttttcccggcgccgatacgacgacggctttccgcgagggatcagccgtcacgatttgaaacactttctcaagctgggctcctgacgcaagagagctgcctccgaattttacaactttcatgatttacatcccctaatatttaaattttctcacaaatttaatttttattatctctctttcaaacatgtaaatcaaggattttttctatgtggggagaacatttgtattttcgtggaggaattttgccgctgtttgtcagatttgtttcccgcaagcgtgtcatcatgtgcaaaaaatgataagcagccaaatgaaggttatagaaaatcctgcaaattcttgatagactgattgtaagacaatttagtgtacggcccgcggatgaccgtttttgaaagcaaaactgtattgactgcgcttggaaagatgataagattatagttgtcgttgataatgataatcattacgagtggggatatatgggagttgtttggcaatcagtcataccgtttgtgatgggtgcagggaggcagcatgaagctacgttacttacttttgctactggcggttttggcgtgtacttctatatttatcggtgtagaagatttgtcgccgctggatatttttcatttaaataaagaacaggcaggtacattgtttgacagccggctgccgcgtttggtgagcattatcatcgccggcatgagcctgagcatctgcggattaatcatgcagcagatcagccggaataaatttgtatcgccgacgactgcgggaacgatggactgggcaaggctcggaattttgatttcattaatgctttttacgtcagcgagcccgcttgtgaaaatgtctatcgcttttattttcgcgttggcgggaaatttccttttcatgaaaatcctcgagagaatcaagttcaatgatgcgatttttattcctctcgtcggtttaatgcttgggaacatcgtcagctcaatcgccacgtttatcgcatataaatacgacctgatccaaaacctgtcatcttggctgcagggagatttctcactggtcgttaaaggccggtatgagcttttatatctgagtatcccgctggtgatcatcgcttatgtgtatgcggataaatttacggtggcgggaatgggagagagcttttccgtcaatctcggcctgaaatacaaacgcgtcgtcaatatcggtctgattatcgtgtcgctcatcgcttcactggtgatcctgaccgtcgggatgctgccgtttctcggtttgatcattcccaatatggtgtcgatttacaaaggggacaacctgaggagcagcctgcctcacaccgctctcttgggcgctgtttttgtgctgttttgcgacattttgggaagggtgatcatcttcccgtacgaaatttccatcggcctgatggtcggtgttatcggcagcggcatcttcctgtatatgctgttaaggagaaaagcatatgagtcataataaaaaaattacgctgctggcggcgctcgccataatatgtatcggattctttctgttctacggactgggcaattgggaatactccctgccgagacgatgcttcaaagtgcttgccatgatgctcacagggggagcgatcgcgttttcaacggtcatcttccagacgattacaaataaccgcatactgacaccgggcattttaggcctcgattccctgtatatgctcattcagaccgtcatcgtgttcctgttcggttcaatgaatatcgtcatgatgaacaaaaatcttaatttcgtcatctccgtcgggctgatggtgctcttgtcactcgttttgtatcagctcatgtttaaaggcgaggggcggaacgtgtttttccttctgcttgtcggtgtcgtgttcggcacgctgttcaacagtctgtcatcctttatgcagatgctgattgatccgaatgagttccaggttgttcaggacaaaatgtttgccagctttaacaatatcaacaccgatcttttaggatttgccggtgctgtctttcttctgacaggcatttatgtctggcggttcacgcggttttttgacgtgctgtcgctcggcagggagcacgccgtcaaccttgggattgattacgataagcttgtgaaacagatgctcatcgtcgtcgccattcttgtgtctgtctctacggctcttgtcgggccgattatgtttttaggactgcttgtcgtcaatctggcgagagagtttttaaaaacctacaggcacacgtatttaatcgcgggttccgtcctgatcagcatcgtcgcgctcgtcgggggccagttcgtcgtggagaaagtgttcacgttttccacgacgctgagcgtcatcattaattttgccggcgggatttattttatctatctgctgttaaaggagaataaatcatggtagaggtcaaaaatgtaagcaaacaatacggagggaaaaccgtccttgagaaaacgtctctatccattcaaaagggcaggctcacctcgtttatcggtccgaacggcgcgggaaaaagcacgctgctgtctatcatgagccggctgattaagacggattccggagaaatcacggtcgacgggcaagagatcggggcctgtaaaagcaacgatctggcgaaaaaaatcagcatcctgaagcagacgaaccaaatcaatatcagactgacgattaaagacctggtcagcttcggcagatttccgtattcccaagggaaactgacggatgaagattgggtgcatatcaaccaggccctcagttatatgaagctggatgacttaaaggataaatacctcgatcagctcagcggaggccagtgtcagagggcgtttatcgcgatgatcatcgctcaggatacggactatatttttctcgatgagccgctgaacaatttagatatgaagcattccgttgaaatgatgaagctgttgaagcggcttgtggaagacttcggaaaaacggtcgtcgtagtgattcacgatatcaacttcgcatccgtatattcagaccatatcgtcgcactgaaaaacggacggatcgtcaaagaagggccggcggaagagatcattgaaacctccgtgcttgaagatatttatgatatgaccatcccgattcaagagattgacagtcagcggatcggtgtgtacttttcttaaaaaccagatgaggtgaaagtcatgaaaaaattcgcattgctattcattgcgctagttacgatttttgttgtttctgcatgcggaaacggggacaaaacatcaggcaaatcaaaagaaacaatcacaatcaaagatgatctgaacaaagaaggagtcaaagtgccgaagaatccgaaaaaagtcgtcgtattcaacttcggaatgctggatacgatggatgaactcggtttacaggatcacgtggcgggacttccgaaacaaaaccttccaaaatacttatcttcatataatagtgataaatacgccaataccggcggtttaaaagaaccggattttgaaaaagtcgcggatattgatccggatttaatcattatcgcccacagacaatctgattcttataaagagttctcaaaaatcgcgccgacgatttatcttgatgatgactatacaaactacgttgacagattcaagcaaaacaccgaagtgatcggcaaaatctttaacaaagaaaatgaagtgaaagataagcttgcgaaaattgacaaatccattgccgatctgaagaaaaagacaagcagcacggataaaaacggattagtggtgatggcgaacgacggcaaaatcagcgcgttcgggtctaaatcaagatacggcttcattcatgatgtgttcggcgtcaaaccggctgacaaaaacatcgaagcctcactgcacggacaaagcatttcctatgaatatatcgccaaaacaaaccctgattacatgtttgtcgttgaccgcggaacagcgatcggcacaaaatcttcaacaaaacaagtggttgaaaatgattatgtaaaatcggtgaaagccgtgaaaaacaaccatgttgtctaccttgattcagctacatggtatttatcaggaggcggcctggaatccatggcgcaaatggtgaaagaagtaaaagacggaatcgagaagtaaaaaaagaacccggtcacatacgtgatcgggttctttttggtttaccgcgtaacggcctgctgctgctcgggctgacgcggttttttcttcaatgtaaaagataggaggaagccggccagcgcgatgcaggcggctacgacaaaggccgcattcatgccgtgcagggcggcgtttgccggagttgacgcattggcgtgcgcggcctggctgctcatcacggaaaccagcagcgccgtaccgatagaaccgccgacttggcggacggtattgttcatggctgtgccgtgcggaattaagtggcgcggcagggcgttgattcccgctgtcgtcaccggcatcataatcatggctgttcccaaaagccgtgcggtataaacgacgacaatccaaatgagagacgtcgagtccgtcagattcataaacggcagggacgtgagcaggatgatgaagaatccggtcatcgcaaggccttttccgccgattctgtcaaacacccggccgataaacggagacatcatccccatcacaatcgcgcccggcaaaagcattaatccggtatcaaacgcggagacgccccggactttttgcgtgtaaagcgggagaatggtttccgttccgatcagcagcgcgaaaacaagcgttccgagcagggtggtcaggctgaaaatcccgaaagaaaacacacggaattccagcatcggttttttgagcttcatctgtcttgcgataaagaaaatcagcgcggccgctccgacaagcagcgaagtcagcacttcagtactggtccatcctgaggaaccggcgcttgagaagccgtaaagcagcccgccgaatccgagggtcgataagatcacggataaaatatcaatctgtgtttctcgtaatgtcgtgacgtttttcatcagaataatcgctaaaagcaaatcgatgactgcgatcgggaagatgatataaaacaaagaccgccaagagaatgcttcgaccgcccatccggaaagcgtcgggccgatcgccggcgcgaacgaaataaccaagccgaccatacccatggcgcggccgcgcttttccatcgggaaaatcgtgagaaataccgtctgcatgagcggcagcataattccggcgccggccgcctgaataatccgggccgttaagagcaccggaaagttcggggcgaatgcgccgacaatggtgcccaccgtgaaaatactcatagcggaaatcaggagggtgcggctcgtaaatttctctattaaaaatgcggtaatcggaatcaaaatcccgtttgtcagcataaacgacgttgtcagccattgcgctttgttggcatctatattgaagtcattcataatgtgcggcagcgccgtgataagcagtgtctggttcaaaatggcgacgaacgctcccgccaaaagaatcccgacaatgacagagcggttgtatggtgcagttttaatactcttattcaagctgattccttctttctttatagtttgagcaatgttttaacggctgcaagcggctggtgcagcggtccggcctgctccaaataaccgatgagcgcttttataagaaaatcccgcggctgtttgtccgctgattctttctccagcataaccgccgcggaagcgagtcctgcggcatcatatttttcctccggaagggctgagacggcttctttcagttccttcaggctttcagccagcaatacggttttgtcttttggctcaaatgaggaagcggaggcggtataaaggtcaatcatctcctgaggcaaagccgtttcggttttcctgttttcgacgatgagattgagatggcggatgataaagtccgtgagcggctccagggcgagcggttctttttccagcttaatcagcgtgatgcattctctcaggagcccctgcaggacgatcaccagctcccatacataaggaataatgtcttcgccgtacgtctgaatcagtgaatcgcgatgccagcagataaaggtggagcgggccctgtgaatatgccgttttacccgctcattaatggaagaggggcttccgtacatcagcatattaaaaaactgctggttgcgcctgaagccttcaagctcagccatcagttttttggcaaaccgttcctcaggggagaggctcgtttcttcatttaataatgaagcggccgctaccatctgtttctggttaaaatcgagcagctccaggagcaggtcttcctttgattcaaacagcttatacaaagatgctttggagactttgcactcctctgcgatcgcctgcatcgagaccgacgaaaagcttttcccggaaaaaagcttccttgccgccagcagaatatccgttttcttatcattcataagcccagattccttctttcgtcacaatagaaaacccatcggttcacagaaaaccaatgagtatatgatgaaaatattaacaaaaatttttacatagtgtcaacgcttttgtttgagaaatagaaaaaacctgccggagtgttccgacaggctgatacgtttatttatccgtcttaaatccttgtttttcaagcatttcacgaatgtgaggataataaacctgcttatagtaggaagtgatgccttgtgaccagtttcttgtttcctgtccgtcggtgcgttttttcatgtattcggacatctgcttgtcataggcctcgatatgggttcttaaatcttcttcttgatacgtttcatgatgcagaacggctgcttgcggcagacgcggttttttcgcggagcggtctgccggatggccgatgacgagaccggaaatcgggaaaacgtatttcggaagtttcagcaattcaatgatttcgtcaggcttgccgcgcacggcgccgatcggcacagtgccgagtcccattgattcagccgcagccgttgccgtacccagcgcaatcccgacatctacggctccgactagaacggactctaaaccgttcgtgatctcaagcggtgtatcattatattcttcaagcgcaattttggcgcggttaaaatcagcgcagaataaaaggaaaacaggcgcttggtcaatccacggctggccgccggccaattcggatatttttttcttccgctccttatctttcaccgcaataacggtaaattgctggccgttaatggaagtcggcgctgcctgagttgcttggatgataaggtccagctgctcatccgatacgggttcatctgtgtagctgcgaatggaacggtggtctgttaatatttgaaggacttcgttcatgtcattcatcctttcgttactctgacagttctgtgcggacgacgtcaagcggcgcactcagcacttcttttgcttttgccacgaatccttggaaatggtcagttgcgttgtggaatttcatcgcttcttcatctttccattgctcaagcataacgaatgtattttcctcaccgactttttcgaaaagatcgtattgcacatttccttcttccgcgcgtgaatgctgaacaagtgattgtgcttctcctaaaaattcctcgcgtttatccgcttttactttcatgtaagcctgtaagacgatcattgttattcctcctgattgggtttatttgttatagttcgaatattatcgaactaactgtaacatgtttcgcagtgaatggtaaaggaaaaaccctcaccgcctaaattgtcacccgccgcttttatgtgttacatttgactcatgaacattccaaaccatcctgaaaccgaccgcttacagctgacaaaggttcttcatgctctgagtgatccgctccgcttagagctggtcaaacaattggcggaaacaacagaaaaaacgtgcggtacctgcgctgatgtccgggtcgccaaatcaacgctgtcccatcacttcaaagtgctgcgggaagcggggatcgcccaagtgcgcatagacgggaagcaccgttattattccctgcgcaaagatgatttacaagcggcgtttcccggcctgctggaggcgattttgcagacagaaccggaccgctggtaaataagtccccgaattccgggggtttttttatgcgtcgaaaaccgcccggtaaagcctgaggacgccatcttgaatatcgctctccttcaggcgggcgaaccccagaatgagctgcggcttatttgaatcgcctcctgctttcagacggaaccggctcatcgcaaacagatcgagctgttctgcatccgcccgtgccaaaatctctttttctgaacgggcgcagtcaaactcagtgacaaaatgaagccccgcattggcgccctttacactgattctttctccgaatatttcttctaaagccgaaatgaggcgttcccgcatgttcttataatgctgcttcatctttttaatatgtttctgatattcacctgagtcgataaattctttcagcgcgagctgggcaagcgtgctgcacgtatgcaggtcatacgctctctctttgaacgtccgcaaaagcccgggcggcagaaccatatagctgatgcgcagacctgggaaaagggattttgaaaaggtccccatgtagatgacattttgaaaccggtcaaggctttgaagcgccggtatcgtatcggcgtcatatttaaattcactgtcataatcatcttcaatgatgaagcggccgttctgttcggcggcccagtttaaaagctgaatccgccgggaagcgggcatgatcacgcctgaggggaattgatgggaaggcgtggtgatcaatacacagggccggcgtttttcgatttcggccatggacatgcctttttcatcaaggctgatcgtcgcaacctttttcccgaggttttgcagcagccggtacatcctcatatatcccgggttctccatggcgtacagcgcgtcttttggcagcagttccgtcagcagctgcgtcagcatttgcgtgcccgccccgagcacgatttgttccgggcggcatgtaacgccccttgtcagggaaataagccgcgaaatggtttcacggacttcatataagccttgcggatggacgagttccccgagtgtatgaaatgaacgggcggctgctttatgctcacagcggaaccagcttttcaggggaaaatgcgccgtatccacgctcatatgagaaaacgaaatccagccgctcttatccggctcccgctcttttaaatcttcaggcaatgagagcgaaggcgtttcttcatgataaaccgtatcaatttcctccacgaaaaagccttttctttcgactgcatataaataaccttccgaaagcagctgctgataagctgaattcactgaattcacgctgaccttcagcgtctcggcaagctcccgtttagacggcacctttgtatgaggcatcaggctgcgtttcaaaacggccgcttttatgtgctgatagatctgctgatagatataatccgccgtttccgaatgattaatggaaatcgtcagcatccagaccctgctcctttctgataccatggataaattgattttggtacttttcatcataccaaaaagaagtcagaatgataagaaaacaatatagggggatggaatctatgagtcgaacagcatcatcggaagtgacaactgcccagtggcagcaaaaacgggaccaattcgtttccaagggggtcggcaacggaaaccgcagcatggcggtaaaaggggaaggggcgcttttgtacgatttggacggcagacgattcattgattttgccggagcgatcggaacgctgaatgtcggccattctcatccgaaagtggtggaggccgtgaagaaacaggcggaggatctgattcacccgggatttaacgtcatgatgtatccgtcttatattgagctggccgaaaaactttgcgcccttgcgccgggagatcatgcgaaaaaagcgatttttctcaattcgggggcggaagcggtggaaaacgccgtgaaaatcgccagaaaatatacgaagcgccaggctgtcgtgtcatttacaagagggttccacggccgcacgaacatgacgatgagcatgacgagcaaggtgaagccttataaatacggtttcggcccgtttgcctcagaggtgtatcaagcgccgtttccttactattatcaaaagccggccggcatgagcgacgagcagtatgacgactttatcatcagcgcttttgaggatttctttatcgccgcagtcgcaccggaaaccgtcgcctgtgtcgtaatggagccggttcagggagaaggcggcttcatcattccttcaaaacgtttcgtgcagcacgtcgccgctttttgtaaaaaacacggtatcgtttttgtagcggatgagattcagaccggttttgccagaacgggaacgtattttgcgattgagcatttcgaagccgttccggatttgatcaccgtatccaaatcacttgcggccggattgcctctgagcggtgtcatcggccgggcggaaatgcttgatgccgccgcgccgggggaactcggtggcacatatgcgggaagcccgctcggctgtgcggctgcgctcgcggtcttggatattattgaagaagaagggctgaatcagcgttccgaagagatcggccggatcatcgagcatcaagcgatcgagtggaaaaaagagcatgcctgcatcggagaagtgcgcagactcggcgcgatggcggccatcgaaattgtcaaagatccgtacacgcgggaaccggacaaagcaaaagccgcggcgatcgctaaaacggcgaacgagaacggactgctgctgctgacggccggcattaacggcaacattatccgattcctgacgccgcttgtcgtgacggatgagcagctcaaagaaggcctttccattatcgaagcagctctgtgagttcaattattggaatcccgccggatgtgtctgctatcatgaaagtgtgagatacatcaacaagcattcaatggttttactataggaaagaaaggaatgttcaatatgccagaacaattaacagtgtacaacccggcaacgggagaggcgatcgaaagcatcccccagcagacggccgaagatgttgaaaaagcgattgaacgttcacatcaagcgtttcaatcatggtccaaaacatcagcgggagaacgtgcctcacttttgagaaaatggtatgagctgattgttgaaaataaagaagaacttgcggaattaattacgaaagaaaacggcaaaccgtacgaagaagcggtcggagaagttttatacggcgccggctatattgaatggttcgccgaagaagcaaaacggatttacggcagaaccgtacctgcgccgacaacgggcaaacggattgtcgtcacccgtcaggcggtcggcccggtagccgcgatcacgccgtggaatttcccgaatgcgatgattacaagaaaagccgcgcccgctttggcggcaggctgtacgttcatcatcaaaccggcggaggatacgccgctttccgcttacgcccttgcgcgtctcgcatatgaagcgggaattccgaaggacgtgctgcaagtggtgatcggtgacggagccgaaatcggaaacgtcttcaccagcagcccgaaaatccgtaaaattacctttaccggctcaacgcctgtcggcaaaatcctgatgaaaaacagcgccgacaccgtaaaacatatgtcaatggagcttggcggacatgcgccgctgatcgtggatgaagacgctgatcttgatctggcggtagcccaaacaatggcctctaaattcagaaatgccggccaaacctgcgtctgtgcgaaccggctgatcgtacacgaatccgtgaaagacgagtttgcgaaaaaactgagtgaagaagctgcgaaactcaaagtcggaaacggtcttgaaaaaggcgtaaacgtcggccctgtcatcaacaaaaaaggcttcgataaaatcgtcgggcaaattaatgacgccgtggaaaaaggtgcagaagtgctgacgggcggaacgtatgaccaaaacgacgaaaaaggatgctatttcgtgacgccgaccgtgctttcaaatgtagatacatccatgaacatcatgcatgaagaaacattcggcccggttgcgccgatcgttacgttctcagatattgatgaagcgatcaagcttgcgaacgatacgccgttcgggcttgcggcttatttcttcacagaaaactaccgccgcggcatctatatttctgaacagcttgaatacggtatcatcggctggaatgacggcggtccgtccgcggttcaagcgccgttcggaggaatgaaagaaagcggcatcggccgtgaaggcggtacggaaggcattgaaccgtacctggaaaccaaatacatgtctatcggactttaatgagccgaaaagaaagccccgcttctaagcggggcttttttattgagcggtctgccggtgaatatcgccggcaggcttttttgatcttgcgggaataatcggttcgattccagacaaaataacagcaaatacgattgaaagaaggtcgccatcatggatatattactggctcttctcccggctttattttgggggagcatcgtgttatttaacgtcaaattaggcggcgggccttacagccagacgctgggaacgacaatcggggcgctcatcgtttcgtttgtgctgtatctgtttgtccatccggtgctgtccgggcgcatttttattgtcggcatcatctcggggctgttttggtcgctcggccaaagcaatcagcttaaaagcatacagctgatgggcgtttcaaaaacgatgccgatatcaacgggaatgcagctcgtctcgacttctttgttcggtgtgatcgtattcaaagaatggtcaaccccgatcgcgattacgctgggtattctcgcccttatttttatcatcatcgggattgtgctcacatctttagaagataaaaaggggcgggcggacggagaaccgggaaacttaaaaaaaggcattgtcatcctgctgatctccacgctcggctatttggtctatgtcgtcgtcgcccggctgttcggtgtatccggatggtcagcgcttctgccgcaggcgatcgggatggtcatcggcggactgctcctgacgtacaagcataaaccgtttaataagtacgccctcaagaacattctgccgggaatcatctgggcgctcgggaacatgtttctgttcatctcacagccgcgcgtcggagttgcgacaagtttttccctctctcaaatggggatcgtcatcagcacgctcggcggaatcttcattctccgtgagagcaaaacgaagcgtcagctggtcgccattgccatcgggattatcctgatcattgtagccgcggtattcttaggcgttgcgaaatcaaattcataacatatgcaggaggtttgaacatgtacacggatttaaaaggaaaagtcgttgccattacgggagcttcatcaggattaggaaaagcgatggcgatccgcttcggacaggagcaggcgaaagtcgtggttaactactatagtaatgaaaaagacgcccaaaccgttaaagaagagattcaaaaagcgggaggcgaagcggtcatcgttcaaggagacgtcacaaaagaagaagatgtcaaaaacatcgtgcagaccgcagtgaaggaattcggcacattggatgtcatgatcaataacgccggcatggaaaatccggttcagtcgcatgaaatgccgcttaaagactggaacaaagttatcaataccaatctgaccggcgctttcttaggaagccgcgaagccattaaatattacgtagagaatgatattcaaggaaacgtcattaacatgtcaagcgtacatgagatgattccgtggccgctgtttgtccactacgcggcgagtaaaggcggcatcaaattgatgacggaaacgctggcgcttgagtacgcgccgaagcgcatccgtgtcaacaacatcgggccgggcgccatcaatacgccgatcaacgcggaaaaatttgccgatcccgttcagaaaaaagatgtggaaagcatgattccgatgggatatatcggtgagccggaagaaatcgcggctgtcgccgtctggcttgcttcaaaggaatcaagctatgtgaccgggattacgctgtttgctgacgggggaatgaccaaatatccgtctttccaggcaggccgcggataagaaaaaaagcgatcgcaggctctttagagccggatcgctttttgcttacacacgttttttctttacaagcgccgcgatggaaaggataattgccgcagctgacagaacgatggccgcaatatcaagcgctgatacgccggatttgctttcttcgtttgactgttcagctccgtgcgcatccgtcacgctcgccgatttcgttattttcgtaatcgagtgaggcgtgtcggctttctcatcacccgtccattctacaatgctgccgtctttgtaatattggtaagcgtcccaagcggcatctccgctcttttcaggatttttcgcaacgaacgtgaactgctggaattggccgggctgaatgccgccgtcctttgcttcccaagtgacggagaccgctttgtcatcatgtttggatacggatgttttccagcccggaatcggctgatactgctgaaattcaacgccggcgggcattttcagcacgactttcgttgtcggctcattcttttccacaggcactttcatcgtgtacgtttcccaagaaccggccgcggattccgcgggtttgactgagacgtgggcgcttgctgcagccgtaaaaccgacgagtgacagggtcacggcggatatgaatattaaagctttttttttcaacatgagatacactccttagtttgtcgttgagaatatttggttgatttcattaaaatcgtttgtcagtccgtggactttgatcttccagtttcccttttcggtgatggacaggttggcggcttcgaatgtgccttccttcgtcttcttcaaatcaaaggtgctttcatgctgtttgccgctgaagcccgtctggtaaacagtgaccgtaaattgctgaatgtcttttactaagctgccgttatgatcggtgacaatgacttgaaattcatttttacccggctggttcggcgtaatgtgcaaggatagggtttccccgtttccgatcgtttctgagccgttaaaaggcaatggcgcgggcggaggcggactgggcaggcttgtgaagacggcggttgtgaataacaccgcaatgcctagtgcccattcggcctttatcgttgcgctgatgctcctttttctgctgaacttcgtcatccatacgtgaacggcgccgagcgcaagcatgatgacaaacagtccgattttcaaaaggagcgtcttgccgtaagcggtgtgaaagagtgaatcgaacgagcggataatgaaaaatccattcagcactcctgaaaataacagcacgccgacagaggcgaacgcccaaggagaaaaccgtctgaccgtttcccaagcgatggttttatcgggttctctccactctgatgaaagaagcagcacaagcgcggcgataccgcccatccatacagacgcggccgataaatggagaaagtccattgcgatgccgaccgctttttcgtcgataacggccgcatgcccggcgaatgcttttgccaaaagcgaagcgaagaagaataacagcggcgccgtccagtacgcaaatgaccggaatgctttcttcttcagcagcgggatcatggacagggcgagcaggataaataagctgatctggatcatccagacgtacccgcctgccgttttcagaagcgtttcttttacatagtccggctgaaacgcggcgctccaagcgccgcccgcgttttctttcgtctggatcgggagctggcacacgagcgcgagccccgttaaacataaagaaatcacgagcagctttacagttcgttttgcttttgatgaatcttcattatttctgtaccaaaacagatggaaaaaagccgtgccgataaacagggagagagcggtgtacaaaataccgcggtcgatggccgcttcgggatgaagcgccgcttgcgatgatgtctgctcctgaagttctccgccggcttttccgatgctgaaagggatgacgccggataccggatgtccgtcggccgataccgcgttccattccgctctgtaaatatcatgcggcagattttttttcaatgccgcggtcatgatgcgggcattatttttttgaatcaccgttttgcccgcgtcaacccgttcaccggatgaattatagaccttaatggagtggaagccttcttcaatctgttcattaaactcaatttcaatctgcttcggcgcttgttttaattcgctgttctcacccggatttgagtttgtgatgtaggcgtgggcgaagcttgttttcggaatcaaaacaaggaacagcaaaaagacgagccagcgtttgttctgtctcatggatgatgacaccgccttccggttggttgttgttatgtcttgctgcaggtgcatcccttctgcctgtcgtgtaagatgatgtccgccgcctcgtcaaaggtgcaaatgaccccgccgaatcctttttgaaaccgttctgcgtaatcaagcgttgagaagggaatcgcctgaggccggcagcagtgaaggtcaatatcggcatggactaaaaagtatgcggaagctgccgttagcgtcgtctgaagaagaaaatccttacaaatgacgtgggacacttcatcctttttatcctcataccgcaaaatcgcgcaatgaatgcagcacatctgctcaacggtttgtgaaacggtaataagctgaacagaatacgaatgctgaatcggccgcaggcaatagccgcattgattggcgcttcgttctgaagcgggagggagcgtaatgccgccgggtgtccggataatccggtttgcatccgccagctgattgacgtctctgtacacggtcatctcggagacgccgaatctctcgcttatgtcagagattttcagcgcgccctcttctttcagccattcaagcaaggtttgctgtctgtgaatcggaagcaattctgcatcctcctttttatgcgaatgagtgatgaacctccctctaagagtagatgttttcacaaatgcacacaagagcctgatgataaaatatgtgaaaaaatgttgaacaatcacaaatgtaaaacacgcagtcagactctgttataatagaagagttgaatggaggaataaacatgaaagaaacgacctgcccgaactgcggcaagccgattacaggcgacatggtcagatcatcgatgatcccgtgccagtttcagtgcgggcattgccatgtgaaattgcgtgaatataaagtatcagctccgattatggctgcggccattgcgatcacggtgcttttgatttatcttgtgcagatggccagaaccgccgtcatgccgatgtttccggcagcgcggtatgtgccggccgccattttcgcgctcgtatgtgcgtatccggtgtttattgtcagtgagcggctcattgccaagctcgtcgtcacaaaaggacacattatatacagaaagcggtaagacacctttgatgaggtgtcttttttttgttaaggatttgtcacagtctctgtgccaaactcctctttacttttcattgaatggggattgtaagcgttttatgatgaagacacaggggagagagaaaccccgtgtcttatttattttcatctgaaggcaggcaaacagggagggaatgaacatgcagcaagaacagcaagctggcatgaaagtgaagatacagcggttcggcagttatttaagcggtatgatcatgccgaatatcggcgcatttatcgcatggggaattatcaccgcgctgtttatacctaaggggtggtttccgaatccgcagctgaatacattggtaagcccgatgattacgtatcttctgccgcttttaatcgcatatacgggcggaaaaatgatctatgatcaccgcgggggagtcgtcggagcgacggccgccatcggagtcattgtcggagcggacattccgatgttcttaggggcaatgattatgggacctttgggtggttatctcattaaacaattagaccgtctgtttaaagataaagtcagacagggttttgaaatgctgatcaacaacttcacggcgggaattatcggcgcggtgctgacgattatcgcgttttatgcgatcggcccggtcgtcctgtctcttaacaaattgctggcggcgggtgtggaagtcattgttcacgcgaatttgctgccgattgcaagcgttttcgtagagccggcgaaagtcctgttcctgaataacgcgatcaaccacggcattttaagtccgatcggaatcgagcaggccgccaaagcgggaaaatccattctgttcttagtggaagcgaaccccggaccgggactcggtattttactggcctatatgttctttgggaaaggctcttcaagatcgacagctccgggagcggcgatcattcatttcttcggggggattcatgaaatctatttcccttacattttaatgaaaccgatgctgatcctcgcggcgatcgccgggggagcgagcggactgctcacattctcgatctttaacgcgggtcttgtcgccgcatcatctccgggaagcatcatcgccattttggcgctgacgccgaaaggaagctatctcggcgtgctggcgggcgtcatcgtggctgcggccgtatcgtttatcgtctcggcgcttattctgaaatcgtctaaagcgggcgaagaagatttgacagccgcggcggaaaaaatgcaggaaatgaaaggcaggaaaagtgaagcggcggccgcattggcagacaaagaggaagagccggaaaacagcgccgctgatatttccgctgaccaagtcagccgcattatcttcgcatgtgacgcgggtatgggatcgagcgcaatgggcgcctccattttaagaaacaaagtgaaaaaagcagacctggatattgatgtgacaaatacgtcgatcaataatcttccgaatgacgcggatatcgtcattacgcataaggacctgactgaccgcgcgaaagcgaagctgccgcaggcggtgcacatttcggttgataatttcttaaacagcccgaaatacgatgaactgattgaaaagcttaaaaactaatcaaacagaaagagggatcttcatcatggaagtattggctaaagcgaacatcaaactgaaccagacagtgaactcaaaagaggatgccatccgcctggcgggacagacgttgattgataacggttacgtgaagaacggctatgtggaaaaaatgttcgaacgtgaagaaacatcatccacgtttatgggaaatttcattgcgatcccgcacggaacagaagatgcgaaggatgaggtgcttcattcaggcatttccgtcatccagattccgaatggtgtggaatacggtgaaggcaatacggcaaaggtcgttttcggtatcgccggaaaaaacaatgaacacttagacatcctgtcaaacatcgccatcatctgctcagaggaagaaaacatcgaacggctgatcaatgcaaagacggaagaagaactggccgctattttcagcgaggtgaactgacatgattgcccttcatttcggagcgggaaacatcgggcggggctttatcggcgccctgctccatcattccggctatgacgtagttttcgctgatgtgaatgaaacgatggtcagccttctcaatgaaaagaaggaatataccgtggagcttgccgacggcggcaggcagacagaaatcatcggccccgtttcagccatcaacagcgcggtgcaagaacaagagctgtacgggctgatcaatgaagcggcgatcattacgacggcggtgggcccgaacgttctcagactcatcgccccgtccatcgcggaaggtctgaagcgcagaacgtcctctgagcctctcaatatcattgcctgtgaaaatatgatcggcggcagcagttttctgaaaaaagaagttttcggacatttgacggaagcggagcgggaactcgtgaaccggacagtcggcttcccggattctgcggtagatcggatcgtgccgattcagcaccatgaagatccgctgaaagtatccgtagaaccgttttttgaatgggtcatagacagaaccggctttgccggcgatcagccggtacttaaaggcgcgttgtttacggatgatcttacgcctttcattgagagaaagctgtttaccgtcaataccgggcatgccgtcacggcgtatgtcggctatcagcgcggattaaaaaccgtcaaagaggccatcggccatccggaaatccggcgtgtcgtgtacgatgcactttcagaaacgggcgagtacttggtgaaagcgtacggctttaagcaagccgaacacgagcagtacatgaaaaaaatcatcagccgctttgataatgaatacatcacggatgatgtgacaagagtcgccagatcaccgctcagaaaactcggagcgaatgacagattagtagggccggccaaaaaaataaaagaaccgaatgcgctggcggaaggtatcgccgccgccctgcgctttgactatcaggatgatccggaagcggttgagctgcaaaagcttatcgcggaaaaaggcacgagcggcgttcttcaagacatttgcggtattcagccgcatgaaccgctgcacggcatcgtgctcaaaaagctcaatcaataaaaatgaacccgcgtcggggggacgcgggttttttcttgcgttataatgagagggaagggaggctgcgtgatgaatcagaagctattgccccatcgttttccgtttcttttgattgacggcacgacgaacagtgaagccggaaaatgggcggctgcttacaaaaacatcagtgaaaatgactggtttataactgaataccaaagagagatgccattttcgctcgtcgttgaagcaatggcccaaacggcggcttgcgcgggaattaccggcggtgacggtctcggtctcttatccgcggtgaagaaagcggaaaggttaggtgccgctttgccgggagaccgtctggatcttttttttgaggtcacgcgaatcagacgcggttttgtgttcggccgggcgaaagcgtccgttgccgggaagcctgtggcggaagcggagctcagcatatttatccagccatcgtaaaaaaagccgcctccaccggcggctttcggacaagcgtgttattttgtatcataatctctctcactttgtgaattgtccctctggtcatgtttgtgtttttcgtcattggcgttttccttcagctcttccagcggaatcggatccgttaaatcatgatgttcaggattttcattcggtttgttcttttgttttctttctttcatcctccatcacctcaatatttcttttcctcaacgctcgccccgccaaacgcaggaagcggttttttgttcctgtgggtcatatgtattaaaatagagacgactacaatataaaaagtgaggtacatatatgccgatacaaagagaagacgcagatattaaactgatcgcgattgatatggacggaaccctgctcaatgacgagcagctcatcccggaggaaaaccggcgggcgatcaaggaagcggaggcgaaaggaattcacgtcgtcatcagcacaggacgcacgctgatgacctgccgcgaactggctgagtctctcgagctgtcatcctttttaatcacggcaaacggcagcgaaatctgggattccaactttgagctggttgagcgcaagcttcttcataccgatcatattcaaaaattatgggatctgaggaataagcacaacacgaatttctgggcctctaccgtcgatagagtgtggagaggggaattcccggaaacgattacggatcatcagtggctcaagttcgggttcgaaatcgaggatgatgaagtgcggaatgaggtgctgaaagagctcaaggaatacaaggagctcgaaatcacaaactcaagtccgatcaacatcgaagtcaatgccctcggtatcaacaaagcggctgcgctggcgaaggtatcggaaaaactcggcttcacgatggaaaatgtgatggccatgggtgacagtctgaatgacattgccatgatcgaaaaagcgggtgtcggcgtcgccatggggaacgcgcaggacatcgtgaaagaaacagctgactgggtgactgatgtcaacacggaaaacggggtcgccaaagcgatccgccactgggtgttataatagaaaaaagagagagtctcagcatgaggctctctttttttgttttgtcagatttgtgactaggtccatggtaggttttctgacaaaaggatgttcaaacttgtcagaattaaatataatgaagagaaatccaacaattcggaatagtcgttccaaatatcggaatgataataaaataaaacgtttacaatacaggagggagcttatgtttcagattgacatcaattgtgatttaggagagagtttcggtgcttataaaatcggactggatgaagagattttggattatgtgacatctgcaaacatcgcctgcggctttcatgcgggtgatcccagcgtgatgcgcaaaacggttgcgcttgcggcggaaaaaggcgtgaaaatcggcgctcatcccgggctgttcgatctgcagggattcgggcggcggcagatcgcgattacgcccgaggaagcgtatgatctgacgctgtatcaaatcggcgcgctgtcagggtttttaaaagcggaaggtgtcgagatgcagcatgtgaagccgcacggcgctttatataatatggccgccgtcaatcccggcctgtcaaaagccatcgctcaggcggtctgtcattttgatcccgggcttattcttttcgggctttccggaagcgagctgattaaagcgggagatcgaatcggactgaggacggcaagcgaagtgtttgcggaccgcacctatcaggaagacggcacgctgacgccgcgttcagagccggatgcgctgattcaggatgacaaaaaagcggtcggtcaagtgattcaaatggtgaaagacagcacggtgacatcacgtaagggacaagctgtaaacctgaaagcggacacggtctgcattcacggagacggcgcccacgcgctgacattcgcaaaaacaatcaaaaaagaattaaaagcggcagacattcaaatcagcgcgcttgcaaaagactgagcagcagagggaggaagacagcatggagcaaaagaaaaaaacagccggaaaggcttccggcaaatggtcgcttcttttaggcgcgacatttttgatggcgacatcatcaatcgggcccggctttctgacgcaaacggccacgtttaccaatacattggcggcaagcttcggctttatcattttaatttctattattttggacattttcgcgcaaaccaatgtatggcggattatcgcggtttccggaaagcgcggccaagagattgccaatatggtgcttccgggcgccggttatgccattgcttttctggtcgtgctcggcggacttgcgtttaatatcggaaacatcggcggcgcgggtctcggtcttcaagtattattcggaatcaaaccggagatcggcgctttaatcagcgcagcggtcgcggtgctgatttttgtcataaaggaagccggaaaagtcatggaccgttttatgcagatcgccggaatcgtcatgatcgtattgacggtgtatgttgccgtaacgacgggtccgccggtcggacacgcggttgtaaaaacttttatgcctgatcatatcagtgtgctggcaatcgtgacgcttgtcggcggcacggtcggcggatacattacatttgccggaggccatcgcttgcttgattcaggcatccaagggaaggaagtcattcctcaggtgacgaaaagctccgtcacaggcgtcttgattacatctgttatgcggattgccctgtttctcgccgtgctcggcgtcgtttcaaagggcctgcgcatcgatcctgataatcccgcggcttctgtattccggcttgcggcgggaaatgtcggctataaaattttcggcgtcatcatgtggtctgccgctatcacgtctgtcatcggcgccgcctatacatcggtgtcattcttcaaatcgttttcggcaaaaatcgaaaagcactcacatggcgtaattatcggttttattattgtatccactcttatttttgtcacgatcggccagcctgccaaaattctggtcgcggtcggttcgcttaacggcttaattctgccgcttgcattagcgatgattctgttgggcgcctataagaaaaaaatcgtcggcgattacaagcatccgatctggctcacgattgcaggggcgatcgtagtggttgtcatggcggttatgggcatctatacattattctcgcaaatgccgcagctatggagctgatgatatgaaaaaccatatgagtgatatgagtcccgaagaagtcagacagcttatcaggaaagggcagatgaccgggccgacggcggggttggccgcttcttacgcacaagccaatctcgtcgttttgcaaaaggatcttgcctttgattttctcttattctgccagcgtaatcaaaagccttgtccggtgcttgatgtgacggatgcgggttcacccgttccggcaatagcggcgccgggagctgatatccggacggactttccgaaatacaggatttatcggcatggcgtgcttactgaagaggtaacggatattacgccgtattggaaggataattatgtcgggtttttgatcggctgcagtttttcattcgagcaggcccttattaatcagcacatcccgatcaggcacatcgatgaaggcgtgaacgttcccatgtataaaacaaatattgactgtattccggcgggcccgttttcaggaaaaatggtcgtcagcatgagaccgattccggaaaggctggcagtccgcgcggcgcaggtcacgtcacgttttcccgccgtgcacggcgcccccgtccgcatcggaaatccgcaaagcatcggcatcagcgatttgcatcagccggatttcggagatgccgtaacggtgcgggaaggtgaagttcccgtattctgggcttgcggcgttacaccccaggcggtgatcatggaagcaaagcctgatatcgtaataacacattcaccggggcacatgctgatcaccgatatacaaaatgaatcgcttgctgtcctgtaagtgagaaagaatacaacgaggtgatgacaatgatgcagtatagcggaaatacagcgcttgatatacagccgtacggtgattccgccgttatcatccgctttggcgggcacatcagcgaagaggtcaacagccgggtgcaggcggcggcagcctgtatggaagaacggccgtttccgggcttcgttgaatgtattccggcattcacaagcttaacggtcttttatgacgtgtctgccgtctcaaacataaaaaaaggcgtctctccttttgccctggtcaagaaagaagtgacagaacgtctcagccatataatgaccggccgcaaaaaagagcgccgggtgatggaaatccccgtttgctacggcggagatttcggtcccgatttagaagaggtcgctgaaatgaacgatctgaccccggaagacgtcatccgcattcatactgaaggcgaatatctcgtttatatgcttggatttgcgccgggatttccgtttttaggtggaatgtctgagcggatcagagcgccgagaaaggcgtcgccaaggccgtccatcccggccggttcagtaggaatcgcgggaatgcagaccggtgtgtatccgatatccactcccggcggctggcagctgatcggcagcaccccgctccggcttttcaggccggaagaacatccgccgagtctattgagagcgggtgatacggtgaaattcgtccggatcacagcagaggagtacagccgcatcaaggagggagccgaatgagtatgaaagtggtaaaacccggtctcttgacgacggttcaggacacggggcggacgggatatcagaaatacggtgtgctgggaagcggcgcaatggatacgatctctctgcgcatcgccaatcttcttgccggaaatcaagaaaaagaggcggggcttgaagttacgcttatggggccagggccttcctttgagttctcagaacccgcggttattgccgttacgggggcggatttcgcctttcatattaatggggagcccgcccctctgtggaaaccggttttgataaaggaaaacagcgtcgtctcattcgggccgtgcaagatggggagccgcgcttatctcgccgtcgcggggggatttgatgtgcccgccgtcatggaaagcaaaagcacgtatgtcagagcggggatcggcggcttttgcggaagagcgctgcaaaaagatgatgagctgccgctcggccgtatgacgccatgttcggaatcaatcgcgtaccgtctgagcgattctttcggacagtatggtttctcagcgcctgattggtctgtcagcagcagagggtttctgccgctgaaaaaaaatccggtcatacgagtgcttgaaggcgctcaatttcacgcttttacagaagaagcaaaattacgtttttatcaagagtcatatacggtcacgcctcaatccgaccgaatgggctaccggctgaagggcgctccgcttgaattgcgggagccgctggaaatggtatctgaggctgtgacgttcggaacggtgcaggtgccgccggacggcaatccgattattctgctggctgacagacagacgacggggggctatccgcgaatggcgcatatcatatccgccgatcttcccctcgtcgcccaaacgatgccgggggaacatattacgttccgggccgtttcgctggaggaagcggaaatgctgcttttggagaaggaacagcagctgaaggagctgaaagcaaggctcaaaatggaatggctgatctgacaaaggggctaaagaccatggaaaacaaaaacaaaaccgtcatcaaatcaatggaactgcttcatttgtttctcactgaaccgagcctgagcttaaatgagctggtttctctatcggaaatgccgaagacttcggttcaccggatggcaagctcactggaggaaacagggtttctcacccgggcggcggacggccgttatcagcttggtctgatctttttacaattcggccagctcgtctctgaacgtctggatatcaggaaaatagccaaaccgattatggaagagctgtgcagcgaagtggatgaggccgttcagctgatcatgagggacggggatgaagccatttacgtcgaaaaaattgaaggcacccaaaccgtccgcctgtatacggcaatcggccgccggtcgccgctgtacgcgggagcttgcgccagaagcattttatcgtttctgccggaagaggagattgacacatacattcagaagacaaagcttgccgcaatcgcctcaggcacgatgacggatcgggctgaactgcttcactccattgaaagatccttgcaatcaggttatacgatcagctattcggaattagaagattatacggcggcgatcggggcgccgattttcaatcacgaaggtaaggtggctgctggaatcagcatcgccggcttcgaagcccggttttcagaggacaggctgccgtatttaaccgaaaaggtcaaaaacgccgcacagcatatttctgagaaattaggttattgaccgagccaatttttcttcactcgcgtacattacaatatcgatagtaacgagtggaggaaagtaaatgggacttgtttatacggcgctgggggattctttgacgacggggaggggatccgggccgttttccgccggttttgtccagcggttcgggcgcatgatggcagaagatttacagacaagaaccgacgtatccatctttgccaaatcaggccttgagacgggagaaattctcgggcttatgtccttcccgtacattcagaggcggattcaggctgctgatatgattacgattacaggctgcggcaacgatttgatcgattcggttcaggcatatcagcaaacatcggacgcttcggtattcaccagcgtgtccagtcactgccatgagaactttgaaaagatgataaccaagattgctgccttaaaagggtcgcacccgtctccttatgagatccgcgtcttcaatttatacaatcctttcccgggcatctccattgcagaaaaatggatatcctcttataatgcgcacctcagcacactcgcatcggcgccgcacgtcaaaattgccgacgtccacagcgctttcaaaggaaaaatgaatgaatatctttcttatgaccgcgtacaccccaacagcaaggggtatgaagtcatggcatgcgtcctgcgggggctcggatacggaagcctcgcccgctcataaaccgcgcgctccttttcatggggagcgcgcttttcgtgctccttaaaacaaacttaaaattgtccgactttcgttctatccgcgcaaaaagtacgctagaataatgggggataaagacagaaatagaattgtgttcaaaaaatgataacagaaaggatggattgctttgctgcgcgccttaaaactgtcactcgcgatgctgattattatacttgcggccgccgcatttacgtatgcggaacatacctccgtcatacagccggttatgctcgtgtttctcggtgcggtcatgttcattcaggggctggaggaaaaacggaaagaaaacgacggctccgggaaattcaatatctataccgccgtttttgtatggtcgatctccttaatcggttttacgcttcacgcgatctgagtctgatagatcctgaaaatgctccacaacgggaaatggtgaataaaaacggtgcagtaaggctttccactcctgatattccggcgatccgcgaaagccttttgtatgatcttctaatgtctcccattccacaagcagcaaatatttatgcgtcttttccatacatttggacaaggaatgggacagataacctttcatgcccgcgataatcggctccgcccggcggaatgcctcttcgaattccccctcaagaccttcttttacatacagcatggctgcttctctgatcatctgaaattcctcctttttttaatagatacattgtataaaaatatgggccgtgacggccggaaaaacaaaaaaattttaaacgctatgagaaaaaaatccttgccagcctgatttggtttaggagaaaataacagttggaaggcaggggaattgacagtgaaaaaagggttatacctattacttttactcgcaggaatcataggtttgatcggctgctcgaaaacggaatcggccgaagacagaatgaaagatttcgtaaaagactggaacggcggtcattacgataagatgtaccaaagcctcacccaggatgaaaagaaaaaacgatccaaaaaggattttgtaaaacgatatgaaaccatttatgaacaagcaggggtcaaaaatctgaaagtcactgccgaaaaacaggacgaagacgataagaaaaaagatgacctccagcacatcgattataaagtcagcatggatacaaaagcagggaaggtcgcttttgaaaacacggccgtcctgaaaaaagagaaaacagacgatggagaatcatggaacattgactggaatccttcttttattttcaaacagctttccgatgacaaaaccgtgcagatcgcaaatgaggaaccgaagcgcggacaaatttacgacaaagacggaaaaggtctcgccgtgaataccgaggtgccggaaatcggcattatccctggaaaactcggcaaggataaagacagcgtgatccaaaaactgtctgaaaaactggacctttctgaagacgatatcaaaagcaaactgaaccagggctgggtaaaagacgactcctatgtcccgattcaaaaaatcagaccggatgatgaaagcaaggtcaaaagcctgcttgcattagacggcgtgacgaaaacgaaagtcagctcccgctactatccgtacggcgaaaaaacggcccatctgaccggctatattaaaaccatcacagcggagcagctgaaaaaagcgaaagacggccaatacagcgatacttccaaaatcggcatcgccggccttgagaatgtatatgaagacaagctgcgcggcaagaccggctggaaaatttacgtcccgcaaacaggtgaggtcattgctgaaaagaaagccgaaagcgggcaggatattcatgtaacgattgacatgaaaacgcagacgaagctgtatgattctatgaaagatgacagcggagcggcagtcgccctcgaaccgcaaacgggagagacactcgcgctcgtcagcgcaccgtcttatgacccgaacggctttcttttcggctggagcggaaaagagtggaaaaagctgaatgaagataaaaacaatccgttttcagcgaaattcaacaaactttatgcgccgggatcaacgattaaaccgattgccgcggcagtcggcctgacaaacggcacattgaaagcatcggaaaagaaaaaaatcaccggaaaagagtggcagaaagattcgagctggggcggttaccatgtcacacgcgtatcagagcgcctgaatgaagtggatctcgaaaacgcgctgatcacatcggacaacatctactttgcgcaaaatgccatagatgccggagcggacgcgtttacaaaaggattaaaaacatttggctttgatgaagagattccgtaccaatttccgattgaaaagtcctcaatcgctaacggcaagctagattccgagatccttctcggagatacgggctacggccaggggcagatgctgatgtctccgctgcacttagcggctgactataccgcatttgtaacagacggaaatctcgtcaaaccgacattgatcaaagacggagaaaaaacaccgcaaatctggcataagcaagtggtgtcgaaagccaatgccgaagaaatcacgaaagggctgagaggcgtcgttgaagatccgcgcggctctgcatatcagccggccgtaagcggcattaccgtagccggaaaaaccggtacagccgagctgaaaacgtctaaagaagataaagacggcaaagaaaacggctggtttgtcggttacgattataaaaagaaagacctcttgatcgcgatgatgattcaagacgtcaaaaaacgcggcggaagccattacgtcgttgaaaaagcgaaaaagcagtttcagaatcattaaatgacgatttttgcgggctgaaaggaaaatcggccgccgaagcagaatgaaacagcatgggcaattcctgaaaacagagatacaagaggctctaagaaaaagggggatttcacatgcagcgcattcaattggctgaagacctggaattttcaagagtgatacacgggctttggcgtctgaacgaatggaatgtttcagacggagagctgctgaatctgattgaatggtgtatcagccaaggcatcaccaccttcgatcatgccgatatatacggcggttatacgtgtgaaaagctgttcggcggcgctttgtccctttcgccttcaataagggagcgaatcgaaatcgtcacaaaatgcgggattgtcattgaatcaccggagcggccaggaaacaagtcgcatcattataatacgtcgaagtctcacatcttagcgtcggcggagcagtcgcttttgaatctgaatacggattatctggatgtgctgctcattcacagaccggacccgcttatggacccggaggctgtggctgaagcgtttcacgcgctgaaaagctcgggcaaggtcagatatttcggggtatcgaactttaaagcgcaccagtacagaatgctcgaatcctatttggatgatccgctcgtcacaaaccaaattgaaatctcggcgtacaagctggaaaatattcatgacggcacgctggatttctgtctggaaaaacgcattccgccgatggcgtggtcaccgcttgcgggcgggagcgtctttacaggacaatcagataaggccctccgaatccgtgccgcgcttcgttccgtacaggaagaaatcggcgccgcttccattgacgaagtcatgtacgcatggctgttcacccacccggcagacatcatgccgattgtcggcagcggaaaagagaaccgcatttccgccgcggtgcgtgcatccgcgtacaaactcagccatgatcagtggttcaggatttataccggtgtccaaggctgcgatattccataaacagaacaaacgcccggaaggtatcttccgggcgtttgtttatgtggtgtgcaatgtctaaaaacaagtaaggtcactttgaagtatagccgtgcggatcaagagtaacaagcgtcatggcatattatctgacacatttttctttttcaatactgtcacacggtccagtgccaaattgccatttgaaaatggttgaataatcattgaaagcgttttatattataatttacaccactttccccggcagcactccccatatgccatacttctcacaactagaaaatctggaggcgcgtttcatgtatatgacagcgagagaacaaaaattaatgaaacatctattactgcagaaccgttacgagacagtgcatgaactggcagaagctttacaagtcagcacaagaaccgttcaccgcgagttaaaaacaatcaaaccgatgatggaatcattcggtctggcacttgataaacagcccggcaaaggactgaaagcggtaggaaacccggaggacaaacaaaaactcctgtcagacctgtcctatgaacagcatgaatacagcgctgaggagcggaaacttttaattctatgttcactattagagtcgcaagagccgatcaagctctacagtctggcgaacgaattgcaagtgacaaacgcgacaatcagttatgatctggatgagctggagacctggatcgcgcccttcggcttgacgctgatccgaaaaaggggcttcggcatacagctgacgggtccggaaaatgcgaaacggaaaatcgtcggcaatctcatcgtcaaccggcttgatattcagagctttttggaagcggttgaattcaatattaaaggaaaacctgacgatgctgaaaaaatgttcggggtcgtaaataaagcggaacttttgaaaatggaccggctcttgattcagctcaaggaaaaaatcgcgatcgccttatctgacagctcatacatggcgcttgcggttcatttaacctttgcgatggaccgaatcagactcggagaaaccatcacgatggaggcttcggaactaaaagcgctgcagcagacgaaggagtacggctctgcgatggaaatggcaaaagagcttgaaaaagcgtttggcgtttcaattccggaagctgagatcggttatatcaccattcatttgcggagcgccaaccgccaatacaaaacggaattcaaaccggaaaacattgaagttgaaacggccttgcaaacgaagcagctgatcggcttcatttctgaaaaaatcaaaattgatctgacggaaaacggttctttatacgacggtttaatcgcccatctggagcctgcgatcaaccgggtgaaagaaaatatcgacatgtacaacccgatgaccgagcaaattaaacgcgactactttctgctgtacatggccgtagaagaaggaatggaaaaattctttccggggcttcttttctctgatgatgagatcgctttcatcgttcttcacttcggctccgctctggaaatcaaacgggaagaagcgaagatcaaagcgctgatcgtctgttccagcggcatcgggtcgtccaaaatgctcgcatccagactgaaaaaggagcttccggaaatccgttcctttgatatgtcttccctcatcgaactgaaggaccgagacatcaccgcgtatgacatgatcgtatccaccgttccgatcccgtatggaaacattgattacgtcatggtcagtccgcttttaaacgaagaagacgctgatcaggtgaagcagtacatcaaaagaaaaattccgctgattcttgacaaaaaaagaaacggtaaaagagaagagaagcagccggagacgcctgatatgctggaagcggccggccgtatggcacattatgcggcggttatccaaagcgtgctgcggaacttttcgatcaaatccattgagtcaaacacggcgtacgaactgtttttgaatcgtttgtttgccatgcttgagcaagaaggatttgtccgtaatgccaaacaaaccgcacagcgccttgcagagcgtgaacgacagggcggactcggcattccgggaacggcgatggcgctgtaccatctcaaaaatgaagaaattgtcacgccttttttcaaaatttatgatttgacagctccatgcagtgtcaaaggcatggacggaaattccctgaccgtcggccgcgctttggtgatgatggcgccggctgatatgcccgctgaagggtcggaaatactaagtgcggtcagctccgccatcatcgagtccgaagacagtataaaagccttccagacggaggatgaagccgatttatacaaacgtttaaacaagctgttttatcatttcattcaggagaaaggacagcggtaaacagaaagcgcacacctcatatggggtgtgtttttttctgcatgtatgagggtaaggggaagggaagaaactaaaaacatgggactattgtatcattcacgaatggaatagttctaaaacaaaattgttttacaagttatattttttggtttaaaatgggttgcgtgaggaagaaaatctgacagagttttttgtgatttatgattatgggagatgaaaatatggagacattacagcatatgattctgcatgacatttcaaatagcgaagagatcgaagctgtaaaaagcggtgcgcataccctgacctacgcggaatatcgaaaacgaatcaaccagcttgcacaagcgcttcttgataaaggaataaaaaaaggcgacagagtggcgatgctttgcaaaaacggccacgcgtcatccattgtcatgtttgcggcactcgaaatcggcgcggttgttgtgccggtcagctggcaattaacaccttacgaaatgaaaggcattttagcagcctgtgaaccgaaagctgtctttttcggcactgaatttaaagagattatggaagaagttcttcctgcgctggtatcttctcttaaactgaagatcgagacaggaacagctgcggagacaacgcctgagtttgacgctttattgacaggctccggtgatacaccggatgtcgaaacggtgtctgaaaacgatacggcattgctgatgtttacctcaggtacaaccggcaatccgaaacgctgcatgatcactcacggcggcatatacaactacgtaaacgcgacattggcttacacggggagaatgcagcatgtccgcttcttagcatgccatccgaattaccatacgagcgcgattatctgccagatggtcggcacgatgagcggaacgacattcattatgacagacaatcaggaccctgtggaaaacttgaagctcatcgaaaaagaaaaaattcaaaccatcatggcgctgccagtctatttcacatacctgctgaaagcatgggaaacgcaccagactgacatgtcttctatcgtttatatgatgacgggaggcacaaaggtgccaagcagcctgatccagcagtatctcgacatcggcatcccgctcatgcacggatacggaagcacggaagcgtggggcatcagctcttggaatccgcaaatgggaatggataaagccgcttccgcgggtaaaccgatggaagaagtggacgtccgcgttgtagatccggaaacaggtgaagtccttccgcaaggctcaattggagaagtcgttgtgacaagtccgtttttattcaaaggctacgaaggtaacgaagaagcgacacgaaaagtgctgaaagacggctggttccataccggcgattccggctatgtggatgaagacggatttatctttatcaccggacgttataaagatgtcatcatctacggcggcgataatatttatcctgaccagattgaagaagtcattcagcaagtgccgggaattctcgaaacggcggttgtcggtatccctgatccgctctacggcgaaaagccgaaagcgttcatcgtgacaaacggcagagaagacctgacagaagaagaagtgacccgattccttcaagaacgtcttgctgcctttaaaattccggacattgagttcgtcagcgaacttccgaaaaacaaccttggaaaagtgagaaaagacgtgctccgcaaacaagcggtacgttcataatagagaacaaaaacccggctgccagccgggtttttttcttgcgttccatgtgaaacatttttctccgaaaacgttttgaactgtctcaatcatgtttatccggaagacagcagaggtagacaagaaatatgacaacgaaccagaaggaggaacttgacatggaaaactatccgaaggaattcccggcggaatcacaaaaccgccagccgggcattgaaagcgaaatgaatccggcgcctgtttacgaatacaaagaatataaaggcgctgacaaattaaaagggaaaaccgcgctcatcacagggggcgacagcggtatcggacgcgccgttgcggttgcttacgcgaaggaaggcgcaaatgtcgcgatcgtctattttgatgaacacgatgatgcggaagatacaaaaaaacgagtggaagaagaaggcgtaaaatgtctgttaatccccggcgatgtcggtgaggaagacttttgcaatgaagccgttgaaaaaacggttgaagaattcgggcgtcttgatattctcgtgaataacgccgcggaacagcatccgaaagaaagcattaaagacatcacaagcgagcagcttcacagaacctttaagacaaacttttactcacaattttatttgactaaaaaagcgattgattacatgaagccgggcagcgcgatcatcaatacgacatccattaatccttacacaggcaacccgcagctgattgactacacggctacgaaaggcgcgattaacggttttacgagatccatggcgcaagcgctcgtcaacgatggtatccgtgtcaacgccgtggcgccggggccgatctggacaccgcttattccggcgacattctcagaagaaacagtcgcttccttcggtcaggatacgccgatgggccgggcaggccagcctgttgagcatgtcggctgctatgtgctcttggcctcagacgaatcctcttatatgaccggacagacgctgcatgtcaacggcggcagatttgtgaccacataaggaggctgaccgatgacgatatcgaaacatgacgtgaatgcatactatcaaaaagcgggaatcgttctgactgatgatgaagtcgaagacattcaaatcatggattacggcttaggcaagcttgaggaaaccgggcttcagctgtttatttacgtgaataccgaccgctactgttcgaaagaattggtgctcttcccgcgccagacgtgtccggaacaccgccatccgccggtcggcggcgagaagggaaaacaagagacattccgatgccgctgggggaaggtgtatctctacgtggaaggcgaaaagacagagaacccaagcgtcctcccgccggaagaagacaaggaatactacaccgtctggcatgagattgtgcttgagccgggcggacaatacaccattccgccggatacgaagcattggtttcaagcgggagaagaaggggcggtcgttacggaaatgtcatcgacaagcacggatgatcacgatgttttcaccgacccgcgcatttaaggatgaggctgcacgcctcatcttttttgtatggaaaaaaataaatttacctgtataatggctaataaaggaaagaaggtgcggtcgtgttttcctgtcaaatccgggaacatctgacgatcagattgcttgccaaagaagatacggacgaattgtattctgttatgaagcgaaatcaaaaccatctcagcgaatggctcagctgggcggaagaactggctgacatcgatacgtaccgcgatgtgatcatccccgaatggcgctataaatatgcggaagagaatgggtttgacgccggaatttttgtgaagggccggttttgcggcatgatcagcatccataatgtcgatacagtcaatcaaaaagcagagatcggctactggctggatcgagagcatgaaggattcggcattatcaccgcaagctgccgggcggtcatcacccatgcatttcaggacctcgggctgaaccgcatcatgatcagcgcggctgaaaaaaacacgaaaagcagggcggtggcggaacggctcggatttcagaaagaaggactgacgagagaaggcatttttgtacagggcgcctatcatgacacggtgaactacagcatgctgaagcgggaatggagcgaagatcggcagaagagcacatttcttggtttaaatgtctccccaatgtggaaaagtaacagcggagacgttaaaaaggagtgattcttcatgaatcaaaatgaaatcaaagaaaaagtgcttgaagtactggatcatcataaagtcggttcgcttgcgacggtagagcaaggcaaaccgcattcacgctacatgacatttttccatgacggcttaacgatttacacgccgacgagcaaagacactcataaagcggaagaaattgaaaacaatccgaatgttcatattctgttagggtatgactgtgaaggattcggtgacgcttatgtggaagtggccggaaccgccaaactgaacaactcagcagatttaaaagaaaagctgtgggatccgaaactggaacgctggtttgacggaaaagacgatccgaacctggtgattctcgaaattgaaccgaagcagatcaagctcatgaatgcgggtgaaaaaacgccggccgagctggaactttaataaatcatttgattattcaggggcaatctgttatacttaactgctaagtgacaacatgcaaataaaaaagaaagtaaacttcttttttctgttttgatatagaagcttcaggcttcaacggacagcttgaaaaaaagctgagcttattcttttccttctgatattcgcccctaacgaagagatggaaaaaagactttttgttttacaattcacaccggcgcggcttcggagccgcagtgacgattgagaggtagggctttcgttgtcttgtgttcaagaacttccatggtgtttactttcgaagaatgattctgtcggaactgttaatacgaatcacccgcaggctaaggcgggcaaccatatattatttatttgcgtaagaaaagaataagacaaaaccgcgccggacatccgggcggtttttttatgtaaacggccgaaaccttgccgcagtctgcagagtctaatcagtatgaaaagatttggaggaatcatacattgcacgttattacttcacaagtactgtttatcttctgttttctgctgctgatacattcgattgaaacgcttgcctatgcaacacggctttccggcgcgagagtcggatttatcgcgtccgcgctgtcattatttaatgtcatggttattgtgtcgcgcatgtcaaacatggttcagcagccgtttaccggacatctgattgatgccgccggatcaaacgctctgtctgttgtgggcgctcagtttcgatttttaatattcggctccacggtcggaacgatgctcggcatctgtcttttgccgacattcgtcgcgttattctccagggcgattatacacttggcggacggaggaggctccgtcatgcaggtatttaaaaaaggattttcactgaacgggctgaagcatgcgcgttcttatatcagactgccgtcagtctcctatttaaaggggcttcaattccgaatgattccgaaacgcttgtttgtcattaatatggtcattacgtctatttacacgatcggtgttctgtccgctctgtacgccggccttctggcgcctgagcacagcacgacggccgttatggcatcaggcttaatcaacggcgttgcgactatgctgctggccgtgtttgttgacccgaaagtctccgtactggcagacgatgtggcgaagggcaagcgcagctacgtctccttaaaatggacctcattgacgatggtcacatcaagggtcgcgggcacgcttctcgcccagctcgtattcatccccggcgcttattatatcgcctgggtgacgaaatggatgtaacgcatgaaaaaagctcctctgcagaagaggagcttttttattgataatttctcaggccgcgatcataaataaaattaccgaacggaataaaggccgcgataaaaccggcggctgaccatttcacatgccatttgacagtaaacgccgcatacgccagcaccgccagataaatgataaacaaaccgccgtgaatggaaccggcaatggtgacggcgagcggatgatgagcccaatacttcagcggcatcgcgataaacagcagcaccaaaagcgacattccttcaataaaccccatcgtgcgaagtctgccgatcggcgtgtgtaacatacagctccctcctgtcggacatcttttttcctctatactataagcaaagggcagtcctaatatgaccatttcgcgtcagttcctgaaaaaaccttcatgatttcagcctgttgttcttgtcatttttcggatttctcttgataatatagccaaaagggtaaggaaggactacagtcatgaaactagataatgtggatctgagcatcattaaagagctgcagcgggacagccgcctgtccatgcgggagctgggcagaaaaatcaaattgtcagccccgtccgtcacagagcgtgtcagacagcttgaatccttcggcgttattaagcgctatacattggacattgatcaaaaaaagatcgggctccccgtctcctgcattgtcgaagcgacggtgaaaaacggaaaatacgatcaattcaaaacctacattcaatccattcccaacattgaattttgttttcgggtcgccggggcggcgtgttatatgctgaagattaacgcggacagtctggaaacgatcgaacacttcatcaaccgcacctctccgtatgcccaaaccgtgacccacgtcattttctcagaaattgacacaaaaaacgtcctcgattagagagagcgtgaggaagtctgttataataacaggatgagtgtgaaagaaagagaagtgaaaagcatgtcaaaaacagttgtattagctgaaaaaccttcagtcggccgggacttggcccgtgttctgaagtgtcataaaaaaggaaacggatatcttgaaggcgaccgctacatcgtcacatgggcgctcgggcatctggtaacgctcgctgaccccgaaggatacggcaaagaatttcaatcatggcggcttgaggatcttccgattattccggagcctttaaagctcgtcgtcattaaaaaaacaggaaaacagttcaatgcggtcaaagctcagcttgtccggaaagacgtcagccagatcgtaatcgctacagacgcaggacgggaaggggaacttgtggcccgctggattatcgaaaaggcaaacgtccgcaaaccgattaagcggctgtggatttcctctgtgacggataaggcgattaaagaaggatttcaaaagctccgcagcggcaaagagtacgaaaacctgtatcattccgctgttgccagagcggaagcggattggatcgtcggcatcaacgcgacccgcgccctgaccacgaaatttaacgcgcagctgtcatgcggacgcgtccagactccgacactggcgatgatcgccaaacgcgaagcggatattcaggcgttcaaacccgttccttattacggcctccgcgcggcggctgatcagatgacgctgacatggcaggataaaaaaacaaaacagacaagaacgttcgatcagacggtgaccggccgtttggcaaaagacctgcaaggaaagccggcagtcatttcagaattgaaaaaaacggcgaaaaaaagcttcgctcccggtctttacgacttgacggaattgcagcgggacgctcataagcgcttcggtttctccgcaaaagagacgctgtccgtgcttcaaaagctgtatgaacagcataagcttgtcacttacccgcggacggattccagattcctttccgcagacatcgtgccgactttaaaagaccgtttaaacggcatggaagttaagccgtacgcccagtacgtcaatcaaatactgaagcggggcgtcaaagcgcataaaggattcgtcaatgatgcgaaagtatcggatcaccatgccatcattccgacagaggagccgctgatcctttcaagcctcagcgacaaagaacgaaagctttacgatctgattgccaaacgttttctcgccgtgttaatgccggcgttcgaatacgaagaaacaaaggtcacagccgatatcggcggcgaaacatttaccgcaaaagggaaaacggttcaatcgcctggctggaaagccgtgtatgatatgtacgaggatgacgacgatcatgaggaagacaaagaccagacgctcccggatcttcagcaggggcagcgcctcactgtctcatcattgaaagaaacgagcggtcagacgaaaccgccggcgcgctttaatgaaggcacgctgttatccgcgatggagaacccaagcgcctttatgcagggagaagagaagaaccttgtgaaaacattgggtgaaaccggcggactcggaacagtcgccacccgcgctgatatcattgaaaaactgttcaacagtttcttgatcgagaaaaaagaaaaagatattttcattacgtcaaaagggaagcagctcttacagctcgtcccggaagatttgaaatcgccggccttaaccgctgaatgggagcaaaagctctccgccatcgcagcgggcaaactgaaatccgccgtgttcattaaagacatgaaaacatatgcgggcaaaacggtgaaggagatcaaaaacagcagccagactttcagacatgacaacatttcaggcaccgcctgccctgattgcggcaaaatgatgcttaaagtcaacggcaaacgcggcacgatgctcgtatgtcaggatcgtgagtgcggcagccggaaaacgctggcaagaaaaacaaacgcccgctgtccgaactgtcataagaaaatggagcttcgcggccagggcgaaggccaaaccttcgcatgtgtatgcggccaccgggagaaactgtccgtctttgaaaagcggaaggcgaaagataaatccggacgcgcatccaagcgggacattaactcttatatgaaaagccaaaacaaagaggagccgatgaacaacgcgctggcagaacagctgaaaaaactcggcctggataaatagatcagagaaaggcagcatttgtaaagaaatgctgccttttgttgtgttttttactgtaatgggaatacgatccatgtgaagagggaaaaggtgagaggcggcgcttccatttaaaattttccaatgtgaaaaaatgctagtattcttttatcgtttcctttatagtaaaaatactttgtgaaaaaataagatatgggtctaaaaaaggatttgtaaaataggaggatggactgtgaagcaattcgtttttcgtctgatgatccttttgatttcaatcgttctgacggcggggtgcgcggaggccggacctgaaaaacagacggcggccgaaccgtccggaccgcttcagcccgcagagcattttatttatcataaattgatgaacgggcgggggatgatccggacgaacatatccggtgagccggaatatttatctgagtctctcggactatggatggcatttttgctgaacaggaaagatgaacggcagtttcaagcgcaatatcagcttctcaccgattcgtttctgacgaaaaacgggctcgtgtcgtggaagattgacgggaataaagcgagcggcaccaatgccttaattgacgatttcagaatcatgaactgtctgaatgaggccggaaccctgtggggaaacagtgaatacgggaaaacagcggtgcagatcgggaaggcgctggaaaaatacaatacaaatgacgggtattttacggattattatgatgccgcttcaaatgccgcatcaaagaccgtgaccttgtcctatgttgaccccggcgccttacagatgctcagagaaaaagggattatcgatgagaaaacggaaaaccggaaccttgatgttctcaatcgagctcccctgaaaaatggttttctgccgaaatcattcaataccgaaacaaaggaatacaaatatgacagcgaagtgaatgtcatcgaccagctgtacgccgccgtgaatctgaagcggggcgatggcaaggctgccgcgctgtcaaaatggatgatagaggaatttaagtcgcgcggacagctgtacggacgatacagcgcagacacgaaggagccggcggttcagtacgaatcaccgtccgtttacgccctggccgttctttttttagcagaacaaaaagctgatccggctgtcatcaagccgctttatgaaagaatgacttcatttgaaacactggacacgctgaaacccgattacggcggctatatgagcgggagcgatacacattctttcgataacctgctgccgcttctggctgaaaggaaattgtttaatgaaaatatcattcaatgaatcacaaaaactgtgcagctacacagcagttatgctggtgctgctgtctttttttatttactatgcgtctcagcaatccgcagggcttctgataacctgcatcacattgcttgttgcgggagccggtatatggttcggggcaatctacgcgctcgtcatgaccttactcgtcttatttgttctcggcagcctgctcctgtggtttcagaccgggagctttatggcgtctgccgatgccgaaagtctgcaggtgctggtcatttgggggattgcgctgctgctcttttcttacatagcgggaaggattcacgagttggcgaaggggcttgaacgctcagtgaaacagctgcgtgaagagattacgagctttgtcgccgtcgacagggtgaccggctttgacaaccatctgcggatgaagctggagctttccgaggaaatcaagcgggcggaacgctacggcaattccttcgtctttttgctgctgcacatgcattatttcaaggaattcaaatccctatacggagaaaaagagaccgatcggctgctggcgtttatcagccgccaaatccggtcaagcgttcgggaaacagacaaaaaattcaggccgtccgccgaacggttcggcatcgtgctgacccatacgcctgaagaaaacatgccggccgttctggcgaagctgaaaaaggaattggatacgtaccggctgcaaaacggtaaatacgtctccatcaccttccgtgtatgttacttggcgtaccgaaaggatttacaaacggccgagcaatttttaaatgaactggaaaacgagatgatgatgaatgaactctaaatggatacgtctcttactctcggcgcttttcatgatttcggcggtttatgttccccgtccggcggaagcaaaagacaaaaaggacggcattctcattatttatacaagcacggacggcaaagaaaccgctgaggtcaaaatgcttgatctgaccgcgggccatttctcatccgccgtcaccgtgaaaagcgacggagacatcacagccgcggacttcaaaaagaatcggcgcgtcatctattacggcgtcacgaaaaaaaagctcagcacatcatttgtgtcactgatcagcagcatgccgcagcagcttatcagcatcggctataacgccggacagttccgccaatttgcggggttgtccctgacagaaaaagaaacggtataccgcatttacggcaaaaaagaaaaaacagacatgccgcttgaaaagggggtgtccgtgctcggcgtatcgggagtaaaaggaaagtccctttatacataccggtccggtgacggcagcacccgcccttttatgtggaaaacggcgcgctctgactattatttcggtgtgacgagcctgttaaatgattcgtttctgacggcgaaagcgatgcgcagcgcattcggagaatcagagggcggcaccctcctttatttgcggcttgaagacatcagtccgatgtcagatgaaagattgctttacgaagcgggcgcttacctgcataaaagacacattccgtttattctggcggtcattccggtctatctcaatccggaaaacggagaaaaagtatacctggcggacaagccaaaaatggtcagcgtcctgaaaaaacttcagcaaatgggcggtagcatcattattcacggctacacgcacgcataccgatacagcgaaacgggagaaggctttgaattttgggatgccaaagcggatcagccgattacgtcagaaaatgcggatgatactccggtcaagcttgaaaaggaacaggattttccgaatgaaaaagcgtaccgggcgtatgtgaagcctttccgtgaaaaagaaaacatctacacgagaacgaagctggagcaggcgattgacgatctgacagagctcggcctttacccgctgtcattcgaagcgccgcactacacgatgtctgaagaaggctacaaaatcgcatcttcttatttctccagcattttcggacaagtgcagctcagcggcgcgacgtggaaaacctcgggcgcccctccgttcgtctcaaagccggctatgctggacgggatgacgctgtaccctgaaacaatcggttatgccgataactcaaaggaaaatccgctcggagatatggagaatcatatttctcagatgattgatttcggcggcggaacggcgggcggtttctaccatccgtatctcggcatgaaataccttcccgagctcgtcaatcagatggagcggattcccggcggcgagtggctcgatctgaagaaaacgaagcaaacggtaacgtcggacagcgtcaggatcaaaacggacggagacggaaccattcatgtggaaaacaagattcatccggtaacggcctttttcaatcatcaccagcagacgcctcttgaaaaagcgctttggattctctccggcgtggtgttattgtttatcatcatgttcgcctgctacgtcctttatttgcgcgccacattaaaaaaacgaatctttaaggagagaagaagccttgagtaacattctgttttttatctcattaagtttaatatgggtgatgcttctctatcacatgtttctgatgcagggcggattcaggcattatatgaccttcgaacggaacattccgaaatggcgcgcaaagatgggggagctcccgaaggtcagcgtgctcatccccgcgcataacgaggaggtcgtcatcaggcagacgctgaaggcgatggtgaacctgtattatccgaaagacaggcttgagatcattgtcgttaatgataattcctccgaccggacgggagacatcgtcaatgaattttcccgtcagtatgacttcattaaaatggtcatcacaaagcccccgaacgccggaaaaggaaaatcttcggcgctgaactcagggttcgcggaatcgaacggagacgtgatctgcgtgtatgatgcggacaatacgccggaaaaaatggcggtgtactacctggttctcggtctgatgaatgatgagaaagcgggagcggttgtcgggaaattccgtgttatcaatgcggcgaaaacgatcctgacgaagtttatcaatattgaaaccatctgttttcagtggatggcgcagggcggcagatggaaatggttcaaaatcgccaccatcccgggaacgaacttcgcgatcaggcggagcattatcgaacagctcggcggctgggatgataaggcgctggcggaggataccgagctgaccatccgcgtgtataatctcggctatcatatccgctttttcccggcggctgtgacatgggagcaggagcctgagacatggaaggtctggtggcgtcagcggacaagatgggcgcgcggcaaccagtacgtcgttcttaagtttttatcccaatttttcaagctgaaacgcaagcggatcatcttcgatctgttttatttcttttttacgtattttttgtttttcttcggtgtgatcatgtcaaacacgatttttatcatcaatcttttttacgacctgcatctgacagtcgggtttttggcgatgattttgtggatactggcctttttcctgtttatgactgaggtcatgattactttaagcattgaaaaaacagaaatgaacaaacaaaacttctttatcgtatttctgatgtactttacatactctcaggcttggatcgtgctcgtcatctggtcattattcacagagatcaagcaccgattgttcaagcaggaagtcaagtggtacaaaacggagcgatacaatcaaaataaaagcgggtgacctttttgaaaaaagcgatattgataactggccttttgctattgatgtataacgggcaggcggccgcggcccgggagctgaaaacggacggttccgctctcggaacaagcgccggcgcaaaagagcagcaggcgctgactggcgatctgatgacactgtacggggcgaaagacagctcagagctgacctatcagattcctgcgggagcttcgaatgccgatcagtcgcttctgattgattacgaggcgtcaaacttattaattgccccgtcttctttaaccatcgccattgatgatgaacccgtcaaatccataaagcttgacggcagctccaagcggaaaacggtgaagctcaatctcagcaaaagccaatccgcccaaggctatcacaatgtatcattacgattttacggcgtattaaaagagggcgtctgcgtcaggcaggatacgtcaggcaactggataaaaatttatccggacagccgccttgtgctttcagaagcaagcaagtcaaagggagcggatctcggccatttcccgtatccgtttgcccaatcaggcaatacgggtgaagaaaccgatattatccttcctgacaaaccgacctcggcggaagctgaagccgcagtcaaaacagaaggatttctgaaaacggcagacagcaggctgaaggtatcctatgtaaaagaatccgatgccggcaaaatcagcaatccgtcaattgtcatcggcgctgatcagcattggaacgggaaaataaaagagcttttcgaacgggggaacttcaaagcggaagacaacaaactccttctcgccgaacgggttctgacatcaggggacaaacggcagcccgtcctgtttgtcacggcgcactcagacaaaacgctggcggataaaatccgcgtcatcacagacagcgcttattcaagccagctgggcggagatactttgacaatcggccgccttcagcccgctgcggaaaagacaggcaataaactgacattagaggacttcggcgcgggaaatgtaacggtcggatcaaacaaaacggcgtcagagcacttcttttaccctgcggcggccgctgttgataaagacggtaaggtcaagctttcacttacattaaagacgtcggaatcgatccggacgaaggcggattcagctaatgacgccgagagagcggagctgaacgtcatgatcaacggacagccgaatgcggtgcgccttgatgatctcggcaatcaagataaagatggcttttaccacgtctcaatcccgattgatccgaagcttttgcgaagcagcaggtacattgatctgcaatttgtcacatcaggtttgaaacataacaacccgtgtattgaccgtgacgaaaataaatgggtctatattgataaaagcagcatgctgacgtatccggtaagtgatgcggcgcagaaagcggatttcgggcaatggccgctcccgtttgcgggcggcgtgaaagagaaaacagtgatcgtcatcccggatgacgtaaacatacagacactgaaagaactttctctggtggcggattcattcggaaacggctttaccgtaaagacggcatcagacatgaaggaagcggatgccaaaggccggaatgttgtgtttatcggaggcctgccgcaaattccgcttttgaaatcaaacgcctctaagcttctcgtgccgtcagaccgcagcggcgcgtacgatgtttcttcgtttcagatgctgaatgagacaacgaaacaagtcgcgtttacccaggaatcaccttgggactccggccgaagcatcgctgtttttgctccgttatcaggcagcggcgcgtctgtcacaaaagagctgatcagctttttagacagcacaagcgatgccgcaaccgtcgtcaacgaaacggccggcaagcagctgttttcaaaccatcagcaaatcaaatccgacgacagcagtccggcgcctgatacgaaaagccgttccgcagcactgaacgtcacgtatatcgctgttttcgcggcgcttataattattgcggccggtctgatctggctgacggcaagaaggaaaaaagaaaagcggataatgaaaaaagtgaagagtaatgaaggaaaaagaggccgttaacaggcctctttttttgtatttttatttccatttttggcggtgatttttttatttttgaaacagcataaaagcccctttacaactgaacgggacgggagtatgatctcttttataatctatatcgcttaatctgtaatcagagcgggggaaccaatttgcggcgcgtcatgccgcttggggtgaatcctttttcaggtagggccaactctcatcagcccgaatccgacagctaacctcgtaagcgttcatgagaggagatgaatgaaacctgtgcacgattatggcgcaggggcatccgtttgcctctgtgtctttttgctgtgccgaaatatggcatgcaatcgttattcagagacatcatagcagtaagggtttgtaaatcaaacggaaaatgaaaaaaaggggaagacaaaaaatgtaccattcaatcaaaagatttttgattgggaaaccgctgaaatcacaggcggccggagagcagaaactcacgaaactcaaggcgctcgccatgctttcttcagacgcgctgtcatcagttgcttacggaacggaacagattctgatcattttggctgcggtaagcgcggccgcgttttggtattccattccgatcgcagcgggtgttctcattttgctgcttgctttgattctgtcctacagacagattatttacgcttatccgcaaggcggaggcgcttatatggtttctaaagaaaatcttggtgagaagcccggcctgattgcgggcggctcattgcttgttgattatattctgacggtggcggtaagcatttctgccggaactgacgcgattacatcggcatttccggccctgcacccgtatcatttgctcattgctgttttgcttgtgattctgattatgattttaaatttgagagggctgtcagaatcggcgtccattttggcgtatcccgtctatctgtttgtggcggcgcttgtccttttgatcgtcgtcggtctgtttaagctcatgacgggccaggttcatccggccgagcatacaccgatcggcacgcccgtagcgggcatcacgctgtttttgctgctgaaggccttttcatccggctgctcggcactgaccggtgtggaagccatttcaaacgcgatcccggcctttaaaaatcctccggcgaaaaacgcggcccgcactttggccatgatggggattctgctggcgatcttatttacggggattacggtgctggcgtacggctacggcacgggtccgaagcctaacgagaccgttatttcacaaatcgccgcggaaaccttcggacgccatacggtgtactatttcattcaaggcgtgacatccctgattcttgtgcttgcggcaaatacgggcttttccgcttttccgcagctggcgtttaatttagcgcgcgatcagtatatgccgagaatgtttacggtacgaggcgaccgattaggattttcaaacggaatcatctttctcggtatcgcgtccatcctgctcattcttttattcggcggccgcacggaacatttaattccgctttatgccgtcggcgtgttcattccgtttacgctgtcgcagacgggaatgtgcatcaagtggatcaggcagaagccgaagggctgggcggtaaaaatgctgatcaactcatgcggcgccgccatttcatttatggtgctgtgtattttattcgcgacgaagttcaatcttgtctggccggtgctgttattcatgcctgctgtcgtcatgctgtttttcgtcattaaaaatcactacaccgcggtcggcgaacagctgcgggtcgttgatcagcagcctgaggaaatcaagggaaccgtcgtcatcgtgcctgtcgccggtgtcaccaccgtcgtccaaaaatcgattcagtatgcgaaatcattatcggatcaggtcattgcggttcatgtttcctttgacagagaacacgaaaaaaaggtggaaaagcgctgggaagagcttcataacggcgtccgcctcgtcaccctgcattcctcataccgcagtctggttcacccgtttgataagtttttggaaacggtcgaacaaaaagcgaaaaaagaacagttctccgtgatggtgctgtttccgcaatttattacgaaaaaacgctggcagaccatccttcacaaccaatcagccttcttgctccgcgtccggctgttttggaagaaggacatcatcgtcgccaccctgccgtatcattttaaaaagtaacggaaagaccgcaggctgaaatgccgcggtcttttttgtaaaggaggacgacatggcacaaggcgcttttgtcatcatacaaaatgatgggcgggacatattgctcgtaaaacgaaaagacgttccactatgggatttgcccggggcgggattgaagaaggtgaaacatctgaagccgcagccgtcagagaggcctttgaagaaacagggtataacgtgaccatcctgcaaaaatccggtgagtatgaaaggccggcatttgaagatacacagcacgttttcatcggagccattaccggaggaacaccgctgatgaacggatcggaaaccgccgatttacgctggttttcccaaaaccggctgccgctgttcatggtgccgaacagaaaacggcaaataaaagacggactcaatggggcggcaaatcgtaaggcagtccttaaagaccgaaatctgttatccatccttgatctgctgagaaaaaagctgagagtatagcccgtgtttcaacccgtatgaaaaaggggatgaatacaggtaaaaggaggatgcagtatgccaagtaaaacagcaggacacgtaatgacggagctgcttgaacaatggggagtcggtcatatatacggcattcccggagacagcattaatgaatttatcgaagaactgagacatgaacgaaataacctgacattcatccaaacccggcacgaagaagtcgcagccctggctgccgcggctgaggcaaaactgaccgggcagatcggtgtctgcctttcaatcgcaggaccgggggccgttcatctgctgaacggtttatacgacgccaaagcggacggcgttccggtgctggcgattgcgggacaggtggcttccgatgaaatcggccgtgacagctttcaggaaatcaaattagagcagatgtttgaggacgtggcggtattcaaccagcaggtacatacggcagaagcgctgcccgatcttctgaatcaggcgatccgcacggcttacagcaaaaaaggcgttgccgttttaaccgtttctgatgatttattcgcgcaaaaaatcaaacgggagccggtttacacatcgccgatatacctcaaagccgatatagagccgaaaaaagaacatctcgtcacatgcgcgcaatatattaacaacgcaaaaaaaccggtcattcttgccggccaagggttaaaatcggcaaaagaggagctgctcgcattcgccgataaagcggccgctccgattgtgattactcttccggcaaaaggcgtcgtgcctgacagccatccccactttctcgggaatctcgggcaaatcggcacaaagcccgcctacgaagccatggaggaatgcgatctgctgatcatgctcggcacatcgttcccgtacagggattatctcccggatgatacgcccgccattcagcttgattcggatccggcgaaaatcggcaagcgctatcccgtcaatgcgggaatcgtcagtgatgcggctctggggctgaaagagctgacggaatacattgaatataaagaagacagaagatttttggacgcctgcaccgagcacatgaagcattggtggaaggaaatcgaaaaggatgaaaccgaagcgactcatccgctcaagccgcagcaggtcattgcccggcttcaggatgcggccgcagaggacgccgtcctgtcagtggatgtcggaacggttacagtgtggatggcccgccattttaaaatgaagaagcaggactttatcgtctcaagctggctcgccacaatgggatgcgggcttccgggagcgattgccgcaagccttgccgaacctgatcggcagtccatcgccatttgcggagacggcggattttcaatggtgatgcaggatctgccgacggctgttaaatataaactgccgattacggttgtcatattaaacaacgaaaatttaggcatgattgaatatgaacagcgggtcaaaggcaacattgactacgtcacccagctgcaaaatatggattacgccgcctttgcagaaagctgcggggcaaaaggcatcaaagtgacgaaacacgaggaattggctcccgcttttcatgaagcgctcaactcaaatgagccggtcgtcatcgacgccgtcatcggcgacgagccgccgcttccgggaaaaatcacttacggccaagcgaagggcttcagcaaatacatgctgaaaaacttctttgaaaaccaaaaaatcgaaatgccgtcactcaagaaaagcttaaaacggctgttttaagaagccggtggttataaaaaaattaacaggcagcatgcctgttaatttttttaggctttcttattgatgattatttctttactgacccccttccatggtaaggaagtggtcagcagtttgacccgcttggaagcttagaggacgggaaccgtaaccgaaagtatatcgtattaaaatctgcggaaacggtaaagaaaatcgtaaaatctgcagctagcaagcgatggctgataaaaaagcttttggagggccaggacagttcataacaaacgtggttcgctcattagcatcgcacagcccttatcagcaaaaacaggaacaaagactggcgtggcgacgtacaccgtcaagaagggagatgtcctccctgtaattgcacagaaaactgccgtaaacatggccaccatccagagattgaacagtatcaagggcccgaattttatcaaagtcggccaagtattaaagctgacggactcggccagctctccaacaaaaggcaaaaaatcatcttacacgctgccatcgggcgtttttaaagtgacaagccccttaactaagggaacggccgtgaaacagatccagacagctttggcggctctctattattatccggacaaaggggcaaagaacaacggaatagatggctattacggaccgaagacagcaaatgcagtcaaacggttccagtccatgtatggactgcctgctgacggcatttacgggccgaaaacgaaagcaaggcttggagaaatgttaaaaagggaataaaaaagcaggctctaaattgcctgcttttctttttattagcctaatttctcttttgagatcttatccaaattagtaaaaagtatatccaggcccgaaaataagaaagttatgaagaatgaaagaagaatttctccaccttgaaatatagatatgttttcaatgaaattactggaaacatatttaattgagaagtaaacagcagcccatgcaaaaatgaattcaagtatataggctaaccaagcaggtaatttaaaaatatgagtaattccttttacaattgccataaggattagcatataaattaaagctaaaatacttacgacaacagaaaatatgtataagtctgaaagtgaaccatagatgatatactctccgaaaaaatgatttacagttatagctacaaaataaatacctaggctaggtacagttatagcgaagaacagggagaatccaataagccctatgaatgctatatgagctaagtggttgggtggtgtatccacaatctccttttttaatagaatcataaaaataagagatgaaataacaagacagcatagtatggtgagcaatacggtaataaagatagccatgttaacctccaatgaaaaagtgctattagagtgaatctaacagcactttaaattttaaatatgttaaatcaaagcaacaatgaatttagctaaagtggtagctacatctgtaggagctccgatagctttaaaagcttttgtaaattgttttacaccccaattttcacctttatccataatgtcggcaaccttcttagagttttttctaatccatgccgcagctttaggggagaatggctttaaggcttttgataaaagccatccacctgaacggcaggcagctctgaaagccttataggaccacgaaactacaccttgggtttggtagtcaccattgagagccgctttggttggaatagtgccaggcattccagttggaatagtacctggtgcagttttcgttaccggtacaggagttgtggttctgttttcagctgctaaagcacctgaagtacccaagaatgatgtaagtagagttgcgcttaaaactacagggattactttcttcttcatatatattttcctcctaataatttatgaataacaataaaatgtttcatcgctaacgttgtccaatgagcgaggcttttagccttgtcagaaagtccagactttttaagtgaaagataaagattctctccacgtcaatacaactcaaggcaacatattcgtttaatagcttctttaaaaccagtttaagctaaaaggaaaacggcttatcaattattataaaaaattggtttggtaattccagtggcattagtagtggtatctcggttttcttcagctcaggatgtggggacaaaagaagcagttacaagggctaaagatgtggcgaatagaataccgttagctacgtgtttaatgaaaaatcctcctttaggaatgtaatctgccagcgaaatgaaagactatgtatttaggatagtcctatattattctctttgaatatttttccacctccttcagaaaccattctatcaataggtattttttgggtaaatagtatttttatacagtatttttatgttgaggtataatttccctgtgtcttaaaacaagttaatcaggtgagtatgacgcaaaagtaaattgcggttttttttcgttttcactttatgttcaaatagttataatattacaaaaatagcaattagagggagaggtatatatggatcaagttttaccgtcgtcccaagttggtgtcaagatcaatgaatggtacaaaatgattcgccagttcagtgtgcctgatgctgagattttaaaggctgaggtcgaacaggaaatagaggagatggaagaggatcaggatttgcttgttttttattcattgatgtgctttcgtcaccaattgatgttagattccttggagccggaagacagatatcgagatcgccccacagtcgacgaactacttgaaaaaatagaaaagccgcaaaaaagacttacaggcctcttgaagtattactcattattttttcgtggaatgtatgaatttgatcataaagagtatgttgatgcgataagctattatcgcaaagcagagagagagttgaatgctgtatcagatgaaatggagcaagctgaatttcattacaaaatagctgatgcctattatcaaattgatcagcactttgtttccctcaatcatttaaaaaaagccaagcaattgtttgaaaaaaatcaattatacaaagtgaaagtgattggctgtaatatgatggtcggtgctaacatgtacgatatgtacaggctgacggaggcagaatcatattatcgggaagcattaagtaacgcccgtggcttggatgaggaaaaagtgaaaagaattatcggagtgatctttcataactcaggcttagtttatttaagagggaaaaatttgattgctgctgaagagaatttcaaaaaggcaatagacgtgaaagaacatattgatacagtgtatggagtgagatcattatatatgatggcgaatgtcctgtaccaatgtgataaagccaaggaagcacgtttcttttatgaaacggctttaaatcgtgctcggacttctaatgaagaggaatatttggctaaattaaaaatcattaattcattgtacgaagaatataatgaaacagaagtgaaacaaagcttaggttacttggaagagaaacgcctttggtctgatttcgcagagctaaccgaaaaattaggtgactttcattttgagaagagaaactatgcagagggaagaaactttttaaagaaaaccatacatgcccaaacacaaatacttaaggttacggaggctatataatgaagaaacttataatcagctccgctttaatcggtattctttttactggattattaagtgtgacaaatgtttatactgctgaaatgagtgactctggaactttttatatcgctgaaaaagctataaatatttaagtgttctccaatttttgacctccaccttttaagactgggggatttctttttcttatccagtaatcaacatacgctgcctcataaggttcttaaccgttacttgtattgcgttcacctttccgttttgctgtgaagtgttttcttgaacgatgcatgcatgagaaagacgccgtccatttttaagcctatcttcaatcattcaaggacaaacaaaagagctatcgagaagatctcgacagctcctttgtttgttgagcggcttgcttgcatatagtcgtcctaaacgaaaacgatgattgtgaaaatcggcagctggcgagcgatggctgatcaaaaaactcgtgatggatcagcgcggtttcatctgaagaacagccagagagcggtcacaacagcgatcataaagtaatctccatcattcagtttagttccatttttgacaaacacatgtgccgtccggttcgtctttgtccctttcggagttttaagcgcaatgttcttccctatattgtaataaacaactttaaacaaataatatgccagcgaacagaataaaaagagcaacatgaacttgccaataaacaatatcatgtttcattactcctttttgccgttttttcgtttgaatatatgacggaaaagtcaggatgttatataaaaggagaagtattttaccgaggctggtgttaaacattaatgaacggttcgccgcaacatccccagatccggaacaatttcaaaacgaaagagaagcccgaggattattaaaaacagaccctaatttgtccgcttttttttgaacatttgatccaagatgaacataaagagagtgaataagaaggacaccgtaatcatatctatcagaaatatattaggagtatcttttattaatagcagccataccacctgcaaaactaaagaaatagaaaaataagatatatatgtcatgatcctcatatttgttacccccttagcctaatttctcttttgtgatcttatccaaattagtaaaaaggatatccaatcccgaaaataagaaagtgatgaacaatgaaagaagaatttctccaccttgaaatatagatatgttctcaatgatatgattggaaacgtattggattgagaagtaaacagcagcccatgcaaaaatgaattcaaggatataggctgaccaagcaggtaatgtaaaaacatgagtcattccttttacaattgccgtaaggattagcatataaactaaagctaagatactgacgacgacagaaaatatgtataagtctgaaagtgaaccatagatgatatactctccgaaaaaatgatgtattgttacagctgcaaaacaaataatcaggctggggacagtcacagcgaagaacagggagaatccaataagtatgatgaatgctgcatgagctaagcggtttggcggtgtatccacgatctctttttttaatagaatcataaaaataagagatgaaatcacaaggcagcataagaaagtgagcaaaacagtaaaaaagacagtcatgtgacatctccaatgaaaaagtgctattagagtgaatctaacagcactttgcattactttatacgtattttcctgacgatcatttatgaatgattttaaaatgctttcattgctaaagttgtcaaatgagcgaggtttttagcctggctgtcagaaagtccggactttttaagtgaaagataaagattcttttccacgtcagtccagcttaaggcgacatactcgttcagcattttctttaaaaccggttcgatgtgttcattgaaaacggattcgagttcatttcttattttctttcctgctaatttttcaacaagattgaataattttgttttatttttcagcacttctctgattacatctttgactggttttgacacagatgcatcgctttgtgctttaagtccgtaggaaaattgcgtatcagtctgataaaaaaatgattttgtcgttccagtggcattggcagtattatgatgattttctttagctaaggatgcggggacaaaagcagtagttacaagggctaaagatgcggcaaacagaatgcctttagctgcgtgtctaatgggaaatcctcctttagaaatgtagtgtagagagaaatgaaagactatgtatttaggcgggacctgtatgatccgctttgaacatttttccctctcagataccattctatcaataggtattttttgggtaaataggattttaatacgatatttttctcgcaattcaaaatttttttttggcaggatttattttagctgcagtttcgtgaaatgaacatgggctggagcctgcatgtataggctgattgaggcggaatcacattatcggagcggtttttataatgcaggcttaggtaaaaaaaataaacaggcggcatgcctgtttattttcgtttgcgtgagagagcgaagaaaaacgggaaggcggaaccggccaaaaacgtaccgaataaaaacatgcctccgatgaacacatgatagttcaccccgccgatccaaagccccgtgattaaggaaacgatacttaatgcgatcatcacaaagccgggaatcagacgtttcttacccgttgtccgataagcaaaaagagaacagaagataccgatgacaatcggcacaatccacagataaaaaaggataaatactgacataagcaaaactccgatttttcttctatcataccaaaaacgcccggaaaaagatacgaacggcatccggcgtcaaaagaaaaaccggccgctacggccggtttttttctaacggaatgaatcgtagatcacaaacagattaagcgcgatcaccaaaaccgcaatcagccaggcgagagccgtcacccattttcggttcgtcagggcgcccatcaggcgtttgttgcttgtaaacataatcagcggcacgagcgcaaaggagatgccgaatgaaagaacgacctggctccatacgagcgcttctgtggcgttgacccccgagataatgatgatcatcggcggaatgatggtaatgaaacgccgcaaataaagcgggatacggtaacggatgaagccctgcatgataatatcgcctgacaatgtgccgacagaagagcttgaaagccctgcggccagcagcccgatcccgaagagaatggctgaagccggtccgatatagtggccgaattgctgataagccacgtctaaatcttctacatacagcccgttcttgaagaaaagcgcggcggcgacgatgagcatgcttgcgttaatcgccccggcgatcaccatcgcgatgagaatgtcaatcgtctcgaatctaaaaatctttttccgctcattatccgtttttccgacgacacggcgctgtgtcagtgcggaatgtaagtaaatggcatgcggcatcacggttgcgccgagtatcccggttgccaagagcacactgtccattccgtcaattttcgggataaacagcccttcgagaacagagccggcgtcaggtttggcaaagaaggtctgcagagcgaaggcgatcaccacgacaaacagaagtccggcgatgcccgcttccagcgcccggtaaccccggcgctgcagctctaaaatcgcgaatgatccgatcgccgcgataatggccgcttcaaccatcggtatgccgaacagcaggttgagcccgagcgccgccccgataaattctgccaggtcagttgccataatcaccagttcaccctgtatccacagcccggcggatacccatttcggataccggtctctggcgatttccggaaggtttttacccgtggcaatgccgagcttcgcggaaagaacttggattaaaaaagccatcaagtttgaaaagaggatgacccacagcagcatatacccaaatttcgaaccagctgagatattcgtagcgaagtttcccggatcaatgtaggcaatcgccgcgataaaggctgggcctaagaaaggcagaagccgcttgaatcccttgcttttgccgtcaagtgcatcctgcacggcttttgcttgcagtgattgtgctgagatgtctttgctcattatgtctcacctaaattccgatagatttttagctaaataacaaaaagtttcctagatgcaaattattttatctacatcataaatccgcttttatgagatgtcaagttctttatgttcaataaaccggtacattgatgccctgttttatctatgatatgtatcccgccgaagaaaggtccgaaaatgaaaacggcatcgttccgggaaagaagcgatgccgttcgcaaagcatgtttccgcgtccgatcatgcgcggatgcgttgagcgttcttttaaaaaggtgaaaagagaacacttgctcatatcacttcacaactttctgtccggtgcaactgatcctgagaaaaagacgcagtatttcctccgtttcccgggtaaatagaataataatgtttctttccattggaagataaaacctttctgtaccattcaaatgacctccggaaaaactccggccgctctgaataaacgtttgaatcaacgatatatcagtgattccagtccaataaacggctgttatctatcaaaaaaagaatcggcatggtcacttgcgaagaaaagaagttggagcattagacttatttcagtcttccgggcaaaaaagtataataacgtcaggaaagctttccggccatatgataaaagagggggaattttcttggtacgtcgtttgtcgatcatttctttagccatgatttttgctgtttctttattcgcttttggcggctctgcatcagcagcagctttcaaacctaaagctgaaccggacgtttccattttagccagcgggggcacagtcggtatttacggtgctaatatgcgctcatgctctaaggtcagctgttcaacgatcacaacattctcaagcggtaaaaaaattacaggttcttgggtcaccggagaatatgttcaaggccactacaccaattccaataaatggctgaaagtcacgtatgcaggagcgacaggctacgtttcagtcaccacactatcttattattacggtttataagcagaaaaacctcgttctcttgagagcggggtttttctatattccgattcaatttccgcgtttcgtttcatcatcgtgtttcatcagctgatcgatttcttctttagaagcgttttttttccactctttcgcctgacttgtcgcaatgggaatagcccgtccttcttcataaccctcatctaccatcgcattcgcgatttcgatcgcttttttcttcacaggttcctcgagattcttcaatgattgcggataatccttcatagaccaaggcatgtctatcactcctttatgaaaagtgtttcccgcctgaagaaaaagaaaaccgcctcatcaaaaagaatgacagctatttttacgagagaccagcaatttccgaataaaatataaaggataaagaagcaagtacagattgaatgcccaccacatgagatcaaaatcaccgataaatacccaaaaggcaatcgcttgcaggcctgaacaaaaggtcagcacaagtgatattaatgcgaaatggcgccataacgaatgtttccgtttataaagaaacaagctgtacagcccggtcaatgaaatgaaaatatctaggggaaagaatgaccagttccaggccattatcatggcgttatcataatctttaaacgccatgttttttggaatctactcaaaaaaagtaacaatccaataaatgataaatccaatatctgtaatgaggaagagaacctttaaccctttcatcacctgtttctgtccgtatgaacgctgatgccgtttgatgacgtttcactttcggaaataaagtttaaggaaacgacaccgatgatgatcagaagaacagagacagcttttataacagagaactgttcatgaaagaaaaaaattccgatcgcggaaatcagtacgatccccattcccgaccagaccgcatacgcgatggagacacttatatatttcaaagtcaaagtaagaaaacaaaggctgccgatataaaacaataacaataaaatacttggaacaagttttgtaaatccatttgataatttcatgctgatcgtacccaatacttcaaaaatgatcgctaaacttaaataaatccattgcatacagcattctccttcaatcgtattattcaaaattataaaatatatagaatttgaagaaaattaatcaatggaatgttttccggataaaaagtccggccgggtgtaaaaagaaaacgccataaaggtatactatgtagaaagaaatcagaaaggacgtgcaggacgggtgacagaagagcggacagacctggaaagacaactgagagacattcaaaaatgggaaaaggcgcagcagagggcgatgttctggcaaacattcacccgcttgccgtttcagcttttggacaagctgacaccgcaatttattcagaggaaaatcggactcattctcgatgaaacgggaacgtttattcagtcaggcggacagtaccttacatcagaaaagcgcatcatgaaaaagtttcaaaaacggctgccgcacggtacatgtcaaacgcttcacgacatccgcaatgcgccgcttgccgtcatggacgaaatcgcagaagccatagcgcgtacaagcgtaaaggccgcgacggtgcagggagccgcaacgggagtcggcggcgtgtttacgcttgcggcagacattccggcgatgctcggcctgtccttaaagacgctgcaagatatcgcggttgcttacggctttgatccgaaagacaaaaaagaacgcgtgtttatcgtcaaattgcttcagcttgcatccagtgacgtcatcggaaaaaaagcgatcctgcaagatttacggcaatatgatcaaaacgaccaaacctatcagcgcgtcgcctcgcaaatccaaggctggcgggaagtcgtttacagctaccgcgatacgttcgccgcgaaaaaactgctgcaaatggttccggccgcaggcatcatcttcggcgcgtccgccaaccgttcagctttagaaagcatcgcggaaacaggcatcatgctttataaaaaacgccggattctaaaacgcatgaacgatacagaatgataaaaaaccacccgaaaacacattcaatgtgttttctttgtttatcagttctgaaatcgggaaaccaacaaccaacaccaattaaaggaggaattcaaaaatggcacaagataataacaaaatgagcagagaagaagcaggtaaaaaaggcggagaagctacaagcaataaccatgacaaagaattctatcaggaaattggtcaaaaaggcggagaagccacaagcaaaaatcacgacaaagaattctatcaggaaatcggtgaaaaaggcggagaagccacaagcaaaaatcacgacaaagaattctatcaggaaatcggtgaaaaaggcggagaagccacaagcaataaccatgacaaggaattctatcaggaaatcggccaaaaaggcggagaagctacaagtaaaaatcatgacaaagagttttataaagaaatcggccaaaaaggcggaaacagacgaagcagctaataaaagcataaaaggcagacaacctgcagatcaaaagcgatccggcacatcagccggatcgcttttgattttgggaaaatcttgatctgagccgcaaaaccgatacaataaaatgaaaaaggggtttttcactcgtgtctgacatgctgaatttgctcgctatcgccataaagtcaaagaaaaacacgacaatttttcaatcgcggagatcaatgaccactgtgtgcgcctcgcagtgtttacgggagaatatgactggcaccatcaccctgactcagatgaatggttcatcgttctggaaggtgagctgctgatcgattttaaggacaaagaaaccgcagtgctcaaagcaaatgacagcctgctcatcccgaaaggcacgattcaccgcacccgctcttacgtcagaaccgtgaatctctgtgtcgagcatacgcatgcgaaaacagtcatcacagaggaacggtcatgctgatcaaaaagattgtatgtgaaacagacgctgcaaacgctgaagcatttgcgcaagcacagtcaaggtggggagcattatcatgtgtaaatggcttcgtcagacaggcaggcggctggcggaaaaacgcagacggcctgttcatcgcagagatcatcagcgtttgggaggacagacaggcctatgatgattttatggagaacgaacatgaccgcatatacgaagaaaacgagcagaaggctgcgattctttcaatagaagtgatgctgtacgagggggatgaacctgtcattcacgagctgttacatcaccccgacatccggtacgaaccggactggacagttgtgcgcacataaaaaaagcccctttagaggcttttttattttcgtccgggaagcgtgttgtggacatacggcgggacggggtccagcttagctatttcgccgtgcgctttcggttccttttcgtattcaaatggttctccgtccggcgctgtttccttcagccaattttgttcagcgctttctgctccatctgagaaatgaataagcttatgggagaatgactgtttttccagcgccttcgggaatgtggaaggaacgatcggaccttcctgttcttctaattctttaatggccgcaagccattggttttgatgcatggtatcgcgggccaataaaaagctgagcatatctttcacgcctttatcatcggtcatttcatacaggcgtgcgacttgaagccttccttgtgattcggcgttcagattggcgcggaagtctgccagaaggtttccgcttgcgacgatatagcctgcgctccacggaacgcccgtgctgctctccggcattgcgccgagtcctgagacaatggcatgatgcgggttcatcccgcctaaaatggacccgatgaccggatcatcagccgctttttcctgctctgccagcggggcgtcttctaacagtctcgcaatcatcgtcgcgatcatttcgacatggccgatttcttccgtcgcggtatccatcagaagatccttatatttttcattgcctcgtgtattccatccttggaacaaatattgcatggcgacggatatttccccgtattgtccccctaaaatttcctgcatcttttttgcgaacagcgggtcaggacgatccggtttagccggatgctgcagttttttcgtatgtgtaaacatgtctccatctccttttttgctctgtccctatttacttccccggcgggaaaagggatgaaacggagatgggcgtattggtcctgctaaggctcgcggcgcaaggataacaaatcctgcacaagcccgcggccgatcacctgttcatattgtccgtaaatcgggtcgaggcgtttcatccatgtgttcttttccgctttgctcagcacatgaatatgaatggatgaattcttctttatctcttcaagctggtctttattcattttctcagcggaggcttcgttccattccgtcgtttctctcatcgcctccgttaagatggttctcgttttttctgtctgtgaattccagaaatgctcgtcggtcatcacggcataaccgaggtacccgtgattgctgattgtcaaataatcttgaacattataaaattttttagaatagatatttgaaatcgtattttcctctccgtctacgagattgctttccaagagctgaaacgtggaattaaaggaatcctgccgcgggtgcgcgctgagcaggcggtactggtcttcgatcacgctgctcggcatgatcctgagcgcctgtcctttcaaatcgtccggagagaagatcggccctttatttgacgtgagctgcttaaacccgttcgtccagtacgccagtcctttcaaatgatgcttttctaaagaagcgaacaggcgcgtgccgattttgccgttgaggccttcttgcacggctttatagtttgtaaacgcgtacggcagatccaaaacaccccattcgggagacagtgatccgagctttgaggtggagggagcgatgaattgcacgtccccgttttggagggcgtttatttcttcattatctgaatagaggctcccgtttggaaatacctctactttaatggtaccgccggacttttgatagaccaggtcggcaaatttattcgccgcccgccctttaggtgtgttttcagccacgacatgactgaatttgaaaaccatttgatctttcaggccttcctgttcgtcatcataatacggttcttctgttgagaaacgatcatgaaagccgatgaataaagcggttccgataccgagtaccatcaggctgagacaagtcagcaagcttttcatcgaaaaccccctccgccattttctataacaagcataatcgggcgggccgttttcgtaaagagacggaaaggaagaggccaatgacgaaaaaaaagcttaccatccgctggaaaatcaccatactttcttatatcgtcgtgctttttacctttttgatcgtcggcatcgtgctggtcggcaatatccagcatacagaggagcgcgagctgaaaaaacggctgatgaataccgcgcggacggtatctgagatgaccgatgtcaaacgcgccctggagcagaaaaaacaaagggaagacgtgcgccatgcggtcgaagaaataaggatcatcaatgaagcggactacatcgtcgtcatggatatggatcatatccgctattcacatcccgtcagcacaatgatcggaaagcgttcaaggggtgaggacgaagccgcggcgttcgccgagcacatttatttttccgaagcaaagggagagatcggcaccgccgtccgcgctttttatcccatcaaagaccgggatttgaatcagatcggcgtcgtccttgccggtaaaacgctgcccggattcggtgaaattcttcttcagctgaaacatgaaatactgtttatcgttctgctggcgctcgggttcggactggccggctcctttttgctggcccgccacatcaaaaaacaaatgttttggctcgagccccatgagatcgtgagaatgtatgaggaacggaccgctacgtttcactcgatgaatgagggcgtcattgcgatcgataatcagcatcacatcaccatttttaatgaaaaagcgaagcagatattcaatgtcagacaagagaccgacggcaggctgatctgggacgtgttaaaagattcgcggctccctgaaatcgtcgagcggaaccgagccgtatataatgaagaaatccaagtcagcggaaaggtgatcatgagcagcagaattccgattgtcatgaaaaagaaggtcatcggagccgtcgccatttttcaggacaggacggaagcggcgaaaatggcggaagaactgacaggtgtgaaaaattttgtcgatgcgctcagagtccaaaatcatgaacatatgaacaagcttcacaccatcgcggggctgattcagctcggaaaatcagaaaaagcgctccggcttgcttttaaggaatcatcagaacaagaaagcgtcactgattttcttcatcaggccattcagaatgacgccgcggcggggctgctgttaagcaaaatcaaaagaggaaaagagcttggcatttctgtgaaaattgatgaaaacagcagtttctcggcatttccggagcatgtcgaccagcatgacatcgtcgtcctgctcggcaatttaattgaaaatgcgttcggcgcattcgaaacagcggacacggaggacaaacatattgacatcagtatcgagcaaaatgatgaagtgcttgctatattaatagaagacaacggaagcgggatttccgatcagcatatcccgcgcctttatgacaaagggtttaccgtcaataaaacgggaggaacgggatacggcttgtacctcgtcaaacaaatcgtcgacaaagggatgggcgtgattgaagtcgacacacggcagggacagggaacggcattttctatattatttccgatgaagggggaggaatcattcgatggacatcaaggtgctgcttattgaagatgatccgatggtgcaggaggtgaataaagaatttatcaccggtgtttcagggttcagcgtcatcgccacggccgctgacggagacgagggaatcaggcttataaaagatctgcggcccgggctcgtggtattagacgtatacatgccgaaaaaagacggaattaaaacgctccaggaaatcagaaaacaaaagctcgaagtggacgtcatcatcgtctcggccgcaaaagacaaagaaacaatccagcttatgctgcaaaacggtgcggccgactatattttgaagccgtttaagctggagcggatgagacaggcgctcgaaaactataaacaatataaacggaaaattgaagagcatgacacgatgtcgcaagagcagcttgacatgctgctgaaaattccgcaaaatccgtcccgggatctgccgaaggggttaaaccattttacgatgaatgaaattttgacctatatgaaacagcagacggagccgctttcagctgaagaagccgccaaagcgctcggaatcgcaagggtgacggcgcggcgttatcttgattttcttgagaaggacggccagattaagctcgacattcaatacgggggagtgggacggccggttaaccgctacaaattcgtccgctagccgagaccaaaaagaccaaaatgtccgttatgatcataagcttcccctcttcgtatgaaaacgctatcatctttgtatagacgcatcgagaggcaaggggagtagggatgaaaattttcaaaaatcttacggtgcaggtcatcacggcggtgatcatcggcgtcattgtcggactcgtttggcctgaggccgggaagcagatgaagccgctcggcgatacatttatcaatgcggtaaaaatgattatcgcaccgatcatattcctgacgatcgtgcttggcatcgccaagatgggagacatgaaaaaagtcggcaaagtcgggggaaaagcatttatttattttgaagtcgtgaccaccatcgcccttattatcgggcttctggtcgtcaatatcatgaaacccggtgagggccttgattacagcaagcttgaaaaaggggatgtctctcagtacacccaaaacgggggacaggggattgactggattgaatttatcactcacatcgttccgtcaaatatggttgacgctttcgcaaaaggcgacattcttcaggtcttattcttttctgttttattcggtgtcggcctggcggcgctcggtgaaagaggcaaaagcattattgatttctttgataaactgtcgcacgtttttttcaaaatcatcggctacatcatgcgcgcggcgccgatcggcgcattcggggccatggcctatacgatcgggcacttcggccttgattccatcaagccgctggcgagtctgatgctgtctgtatacgttacgatgttcctgtttgtatttgtcgctttgaatatcatttgcaaactattcggtttcagcttgtggaactatctccgttttattaaagatgaactgctcatcgttctcggcacaagctcttctgagtccgtccttccgcggatgatggataaaatggaacgttacggctgttccaaatcggttgtcggccttgtcattccgacgggatattcttttaacctggacggcacctcgatctatctgtccatggcgacggtttttctggcgcaggtgttcggcgttgatcttaccatcggccagcaggttacgatcattctcgtgctgatgctgacatcaaaaggcgcggcgggtgtaaccggaagcggatttatcgtgctcgcctccactttatcggcgcttcaggttattccgctggagggactggcgctgctcctcggcgttgaccgctttatgagtgaaggaagggcgatcgtcaacctgatcggaaacggaatcgccaccatcatcgtagccaagagcgaaaatgagtttgacgaagcgaaaagcacacaggccgtaaaagaaataaaaacggcggtataaaaggaaaggaacggcatgcatccggcatgccgttctttttttcggccgccatgagtaaaaaagataaatttgtttaaatttattaggaggtggacaaagaccttagcgtcattttgttatataatttacaattagagagtgaaagatgaaatctaagggctttttgtcctagcaggagtgtataaatggcggctatttttaaattttttcagcatccgggtgtcagacgtttttccgtttttcttgttttgactggggtgttagttgtattccgaagtatgattaatttgattttgcttacgtttatttttacttttctgatggatcggctggagactgtcatccggcacgtgttgaaccattttttccggatcagccagagggtggtcatcaccattttatatattgcgctggctgtcggggcgactgtcggaggctttgtcttttacccgattgttgccaagcagattgaacagctgattaagcagatcaagcacatcgcgtatcatcccgatgtcattccgttttatgatgagatatcgagcgtgttcggcgatatcaatatcggttcctatgtaaaagaaggttttaatgtactgtatacatacttggccgatatcagcactttcggtttgcaggtcgtgatgtcactgattctcagcatgtttttcctgttcgagaaaaagcggctcacggagtttatgaaaaaatttcagcacagcaagctgtctgttttttactacgaacttgcttatttcggcagcaaatttgcgagaacattcggcaaagtgcttgaagcccaatttattatcgcgctggtgaactgtatcctcaccttgatcgcattggcgattctgcattttccgcagctgttcggcctgtccatcatggtctttttcctcgggctcattcccgtggcgggtgtggtgatttcgctcattccgctcagcatcatcgcgtatacgacgggcggcgctgcgtacgtcatctacatcgtgctggtcattttcgtcattcatgcgattgagacgtacttccttaatccgaaactgatgtcagcaaaaacggaactgccgatcttttttacctttacggttctgattttctcagaacatttcttcggcatttggggcttgattatcggaattccgatttttgtgttcctgcttgatattctggatgtcgtcaataatgaggagaaggaaaaaaacggaccggtcccggataagacataacgacggctccggctcttcacgaatatatgactaatgttataatgcagacagtgcctatgtacgggcactgtttattttttgtgaaaaaggaggaaggctgtatgactgagccgattttacatattgaaggccttgacaaaacaataggcaaaaagcacattttaaaaaacatcagcatggatgtcaggcagggcgagatcatcggtttgctcggtccgaacgggtcgggaaaaaccacacttatccgaatcatcgtcggccttttaaagaaaaacagcggcacgattacaattaacggctttcagcacgatgctgatttcgaaaaagcgcttgaatccgtcggagcgatcgtggaaaatcctgaattctacccgtacctgacggggtgggaaaatctgaagcactttgccaacatgcacaaaaacatcacagaagacaggcttcaggaagtcatcgagcgggtcgggctcacaaatgccgttcatgacaaagttaaaacgtattcccttggcatgcgtcagcgtctcgggattgcacaggccattcttcaccgtccgaatctgctcattttagatgaaccgacaaacgggcttgatcccggcggaatgaaggatttccgcgatcacttaaaggaactcgcggagcttgaagggacgagcatcctttttgcgacgcatttattgcgtgaagtggaggacctttgcgaccgtgtcatcatcattcaaaaaggtgagatcaaaacagaggttgttctgcgcggcgctgcggaaaaagaagaaaaagccatcctcgacattcagccggctgacgaagccttcgaatggctgtcccagcagcaattcgttccggagaaaaacggcgggagcattaccgtcaccgtagcgaagaaggacatcccggcattaaaccgtgcgctcgtcggacaagactttctcgtgtattccatcatgccgtatgcggaatcgctggaggatgaattcatgaaagtgacgacggcgcttcaagaggaggggaagacgaatgtttaaattgacagcgaatgagcatatgaaactctttaaccgaaaagtctcattagtggcgctgattctgatggccgttctccaatttattatggcgcttgtcattaaacggcttgtcatcagttccggaacggatgagaatttcatcggctatatggcgtacgcccccgggctgaatattctgcttgaggcattaacgatcgtgatcgcggcaacgatcatttccgctgaatttgataagaaaacgatcaaatttttgttaatccgcccggtaaagcgggagcggatttttgtatctaaactcattaccgtatttttggtcagcttgtacctgtatgcggcgtactatattctgtctctgctgttcggcatggctttcttcggagtgtcggtgacatctgaatcagggacgcttcttgtgaacaccctgaaagtaatcggcacgaactgggtcgaggcgtttgcgatggcatgctttggcttgttgtgttcttctgtattccgaaacagcgcaacggccgtcattttgtcatttatcgtgctgtacggcgcaaaatcacttgtgacgattatgtcgctcttccaaaacaaatggggtagttttctgctgttcgcaaatactgacctgacgcaatatatgagcggggcgaagccgctgtttgcgggaatgacgccgttattttccgcaggcattatcattatccatatcgtattcttcttagccgtcgcttggtggagcttttgcaaacgcgatattcgggtataaagtaaaggaatgacatttttgtgaaaaagatcacgataaatcaataatttatgctattttgatttataataaaggtaatgacggaggtgctcacttgagaaattttattaccgcattaccgattgtgttattgcttggtttttcctttgtgtcattcatgtttcaattcgaacatcttgtttatttcaggcttgcgctgggtttgttttctacagtggggctgtttctcttatataaaatgaagacgggattccgttatttcatcatctacctgtatgcaagctggatcgtgcttgcggcggttaccgcgtttgaagagccgattttttcaagctttttctttggcgggcttgtgatgacgatgggttatctcacatatatgctgatttatctcgggctcaagcaggaccgcggcccggaagcagtctgaacgcgctattctatggaatagcgcgtttttttgtacagcctcacagttgcgaaacgagacttgaatctctataatacttattaactttatcggaattataatggggggattccagtgtctttatggatacagaatgaacggcagcgggaatggatggaaaaaatcggcctgcttgcagacgaatttcaaaaaacagccgcgcttgatgatgaggcgggccgttttcccgcggagaaaattcaaagactgcgcgacgcgggatatacggcgttaacggtacctgaggcattcggcggtgcaggcatttccgtttatgagatggtgctgtttcaggaacggctggcgcggggagacgcggccgtcgctctcggaatcggctggcatttatccgtcatgggtgagctcggagaaggaaacagctgggatgaaggtgtcttttcatttatcacaaaagaggtgaaaaagggagccgtcctgaacagggcagcgacggaacggcagaccggcagtccgacgaggggaggaagacccggcacttccgctgtcaaaaaagacggaaaatgggtgctgaacggccgaaaaacctttacaaccctttcactgactttggattatatgcttgtgacggcatggattgaagaaaaacaaacgaccggtgtttttctcattcataaagatcaggcaggcgtttcagtcgaagaaacatgggatatgattgccatgaaggcgaccggaagccatgatctccttttagatcatgtcacggtcagtgacgagcggcttgtggagcttatcagcgggccgagagcggcgaaagtgaatggctggctgcttcacattcccgctgcttatctgggcatcgctcaagcggcaagggactatgccgtccggtttgcatctgaatattcgccgaacagcctgaacggaccgattaaagacgtgccggccgttcagcagcgtgtcggggaaatggagcttgaattgttaaaagcgagacagtttctcttcacggcggcgcaaatgtatgatgatccgaaacgccgccctttcatcaaaagcgagctcggcgcggcaaaacatattgtgacaaatgccgtcctttctgttgttgacaaagcaatgagaatcaccggcgcaaaaagcctggagcgaaataatccgcttcagcggtattatcgggatgcccgggccggccttcacaatccgccgatggacgatgcggtcatcggcaaattagcggcggaagcctttgagcaataaaaaaaagagcctgaaaaaggctctttttatgtatggctgttgtgccggagcagtttttgatgcttgcggtcaattctgtcatagatcacattcatcagcttttgattattcataatggccgccttgttttcttttatcagctgttcgtatgtttttattttacgtttcgccatgagcccgcaccttccttacatatttgtattcgctttctaattctccgagcgataattcatataaatgccgttccgactttttgtatattccgttattgatcagcaaatggatcagatgtttttttcgtccttcaactgatgatctgagctgaggagaagacctcatgattaccctcctaatcaattgatattgagaatcattatcagttaatgaaattatacaatggacatattcatatgtaaaggaaaaataccgccaatttttcgacaaatagtttcccggggaataatgctgtcgaatattgcatttggtcagatcaaagctgctatttttccgcttttccatccatactatgaatgagaatggaggagtccttacatgaatgatcaaacggcaaacttaaaacggggcgaaaaaggcgcgattcttaatatcgccgcgtaccttatccttgccgccgtcaaactggtgatcggtcttatttatcattccgaagcgctcagtgcggacgggttaaataatgctacggatattgtcgcatcactggctgtgctgatcgggctccggatttcccagcgccccgcggacagtgatcatgcctacggacattatcgggctgaaacaatttcttcattaattgcgtcttttattatgatggcggtcggtattgaagtgctgatcggaggagcaaaggcgattgtcagcggaacggaggccgagccgagcttcattgcggcatggacggcgctaggaagcgcgattgtcatgtacggcatgtatgtatataacagccgtcttgcggatcgggttaaaagttctgcgcttcatgcggcggcgaaagacagccgttctgacgcctatgtcagtattggggcgttgataggcgtcttaacggcccggcttcatctgccgtggattgatccggtcattgcttttctgatcggaattatcatctgtaagacggcatgggacatcttcaaagatgcttcccactcattaacggacgggtttgatctgaaagatttggagccgtataaacacacagtgaaagaaataaaagaggtcagcaggctgaaggatgtgaaagcaaggtatttggggagcacggttcatgtggaaatggtcattacggtagatccgggactgtctgtgaaagaaggccatgaagtagccgatgaagtcgaatatgcaataaaacatgaacatgatgtgactcatgtccatgttcatgtagagcctgaagtcataaacaaagatcgtgaaacgaattaaatatgctgtgataaaaactctgtgacttcttcgggcgttttcgcgtttgcgctgtgaagatgcgctttcttttcgccgtttttaaagatcagaaggctcggtatgcccattacctgatatttgtcggcaagctcagggagctcgtctctgttcagctcataccaatcattttgattatattcttccaaaatatcgccgatgaacatattcatgcgcgtgcagtcagggcaccaatcagcgaaaaatttcacgatgatttccttgtcggattgaataagttcattaaattgttctgttgtactgatttttttcatatgacacatctccttttccatgccattttaatataaaataaaaaggaattacatacaaatgctttcatattcagaatgcccaaaaataattagatcattttctgaggaaagtgataagatagtaaagatgaattgttgtggggggaatatccattgaaaacaagtctaggattggtgtacggcggaaagtcagccgaacacaatgtatcgctgcagacagcattagctgtaacaaaagcgcttaatactgagaagtttgatatacatccgatttacatcactgaaaaaggagaatggcaaagaggcccgctgctgactgagccggtttccaacgtgaaaatgcttcagctggaacaaaacggtgaaagtttcgctctatcagcattgaaccgggaaatgtttcctgaagcgtcgcctgacgaaaaggcgcagatcgatgtcgtatttccgcttctgcacggaccgaacggtgaagacggcaccattcagggactgctggaattgctgaacgttccttatgtcggcaacggagtgcttgcatcatcagccggcatggataaagtcatcatgaagcatttgttcgctcaagcggggcttccgcaggcgaagtacgccgctttcttaaaaaaggactggaaacagacgccggacagctgcttacagcaggttgaagaggagctgggatatccgtgcttcgtcaaaccggcgaacctcgggtcaagcgtcggaatcagcaaatgccgaaatcgcgaagagcttgaaaaagccttcgaactggcttttgagtatgaccggaaaattgtggtggaagaaggaatcgccggcagagaaatcgaaatcggcgtactcggaaatgacgaaccgaaatgttccgccgtcggtgaaatcacgccgaaaaccgacttttacgattacaaagcgaaatatgaagacggcgacacggatttaatgattcccgcgcaagtgacggatgaacaatatgcggaaatcagcgagatggcgattaaagccttcaaagcgattgacggatcaggccttgtccgcgccgatttcttcctgaccaatgacggtcaagtgctcattaacgaagtgaacacaatgccgggctttacgccattcagcatgttcccgctgctttggaaagaagcaggcgtagattacagtgatctgatcgaacagctggttgagctggcaaaagaacgccatgccgaaaaacagctgattaaacatacattttaatgaagacggacactgcctgaaggggcagtgtcttttcccgtaacagacaacattttcagaaagcgaggtgccacctttgataaagcgaactgtaaaacgaatcgccgacatggtcaaaggcacactgacaaatcctgtatttgaacaaacaatgattgagggcgccgcaaccgatacgcggactttggaaaaaaatcagctgttcattcctttaaaaggcgagcattttaacggccatacctttgtgccgcaagcattcgaaaaaggcgtttccgcggtgttgtgggaccgctctgaaccgaatccgccggaagagcgtgccgtcatccttgtcgatgacacgctggaggcgctgcagacattggcgaaagcttatttgaaagaactcggcacacgggtcatcggggtgaccgggagcaacggaaaaacgacaacgaaagacatgcttcacgccgttctcagcactcagtaccgtgttcacaaaaccgccggcaatttcaacaaccatatcggcctgccgctgaccgtgcttgccatgcctgaagatacagaaatcgccgttttagaaatgggaatgagcgcgagaggcgaaattgattttctgagccgtcttgctgaaccggaagctgccgtcattaccaatatcggcgaatcccacatgcaggatttaggctcaagagaaggaattgcggaggcgaaacttgaaattataaacggacttcgggaagacggcgttctgttttatttcggggatgagccgttgctccgcgaaaaggcgtacacttgccggacaacgacatacggcgcaggcgctgtcaatgatctccgcctgaaagaaataaaacaggcggaagaaggcacgtacttcaatatcgacgggatcgaacgttctttctttattccggttctcggcagacataatgtgatgaatgccatggccgcatacgccgccggcatctatttcggcattacgccggaaaatgccgctctgggactgagccgcctgaaggtgacggggatgagattggaactggttaaaacggaaaacggcatctcgatcgtaaacgacgcgtataatgcgagcccgacgtcaatgaaagcggcggtcgaattaatcgaaacgatgaaaggctatcggaagaaaatgctcgtgctcggtgatatgcttgaactcggtgatgaagaaaaagcattccacgaagaatgcggagctgcgatcaatccggcggaaattgaccatgtatttacttacggcacactcggcgcattcatcgcagacggagcgcgccggcattttgaagaagggcgcgtcagccattatctcgacaaaaaagaactgcttcacgccatacaggatatggccgcttccggcgatctccttctgtttaaagcatcgagaggtatgaagctcgaagaaatcgttaaagatttattagagaagaactgaaaaaatactgatcagcattataaaaatatacaaaaatgaagaaactaattcagggtgaaataattctgtccgtatgaaaaagaaaggccgccggctgggaaatcccgtccggcgcggggtccggcctcgtttgcgggaagaatccggtcaggccgcttccggccgcctgaccatctcgccttattgaaaaacacatagtgtaatggtaagattaaacgtaaagtaattcgggctttgtatacgtatgatcctgtcctttggatgaaagggcagtttttagtggtaaatcacgacattactgaaacagcaatcagaaggagtttgaataatttgactataacgtttcaagatttccaattaagttctgatctcatgaaatcaatcaatcgtatgggatttgaagaagcaacaccgattcaggcacaaacgattccgctcggacttttaaataaagatgtcatcggacaagcgcaaacaggtacaggtaaaacagctgcgttcggtataccccttgttgaaaaaatgaaccccgagtctcctaatattcaagcaatcgtaatcgcgccaacccgtgaattagccattcaagtatctgaagagttatataaaatcggacaagataagcgtgcgaaagtgctgcctatttacggcggtcaggatatcggacgtcagatccgcgcattgaagaaaaacccgcatatcattgtaggtacgccggggcgtcttcttgaccatatcaaccgccgcacgatccgtttaaacaacgtgaacacggttgtcatggacgaggctgatgaaatgctgaacatgggattcattgatgatattgaatccattctctcaaacgtgccgagcgaccaccaaacgctcttattctcagcaacaatgcctgcgccgatcaaacggatcgcagagcgtttcatgactgagccggaacacgtaaaagtaaaagcgaaagaaatgactgtgtccaacattcagcagttctacttggaagtgcaggagcgcaaaaaattcgatacgctgactcgtcttcttgacattcagtctccggaacttgcgattgtattcggccgtacaaaacgccgtgttgacgaattgacggaagcgctgaaccttcgcggatatgcggctgaaggaattcacggcgacttaacgcaggcgaagcgtatggtagcgctccgcaagtttaaagaaggtgcgatcgaagtgcttgtagcgactgacgttgctgcccgcggacttgatatctcaggtgttacccacgtatacaactttgacgtgcctcaagatcctgaaagttacgttcaccgtatcggaagaacgggacgcgcaggaaaaacgggtatggcgatgacgtttatcacaccgcgtgagaaaaacatgcttcgcgcgatcgaacaaacgacaaaacgcaaaatggaccgcatgaaagagccgacgcttgacgaagcattagaaggtcagcagcaggtgacggttgaccgtctgcgcacggcgatcagcgaaaacaacctgaacttctacatgacggcagctgcggaattgttagaagatcatgatgcagtgacagttgtggctgcagccattaaaatggcgacaaaagagccggacagcacgcctgtacgcctcactgatgaagcgccgatggtcagcaaacgctataaaaaccagcgtacttctaagcgcagagacggccaaggcggcggctaccgcggcggcaaagggaaaaacaacaaccgttcttcctacgataaaaaacgctcaagcgaccgccgttcttcaggtgacagacgccagaaaaaatcatactaaaacacaggaagcggaccctttttcggggtccgctttttttcgatatgccggaaagtgaatcttttttgcaaatcagccgtatttgtatgtatgataaaaaatgggaggtaggtatgttgagagcacagccaaaaaatcgaatcagtccaagcggcttaaaagtctggcgtcttcaggaaatcatcctgtccgccttctgtcttctggccgttatagcagcagctgttttaagccatttcttccattggccgtattggatcaccggagtcctcggcatcatttgggtcatcggttcagtgatatccgtctatgccataccgaaaatcaggcacaggatctggcgctatgaggtccatgaaaatgaaattgatattcaatccggcatttttatagtcaaacgggtcattgtgccgatggtgagggtgcagcacgtagatacttcacaaggcccgctcctcagaaggtaccgcctggcctcagtcaaaatctctacggcggcaaccgttcattccattccggcgcttgatatggaggaagctgaccggctgagggattccatttcccgtctggcaagggtgacggaagatgatgtctgaaccgaaacgtctgcacccggcggccgtgattttgaacttattccatattattatcgaaaccattaaaaacattattctgccattttttctcgtctatattgttaattccaaccacttcatccgcttttacggaggcattgcgctcgctgtcctgcttatctggctgattacggcaagtgtgatcgagtggagaaaatttacataccggattgaggacggagaattcagaattgaagaaggcttgttttttacgaaaaagagatacatctccattgaccggattcaatcaatgaatacgagtgccggcatcgttcagcagctttttaagcttgttaagcttcaaatcgaaacggccggcgacgggaaaaacgccgaggccgtcttatccgccattactgtggaagaggcggaacggatcagagcggctgtttttcagcaaaaagcggagcaagaagaacgaggggagaccgcagcggagcaggagccgatgcgcggggaagatgtgcaatccgtttaccgcctgtctgtgggtgagctgcttatggccgcctcaacatccggggggatcggtgtcatcatctcagcggtattcgccctcttttctcagcttgatgaagtacttccgatggactggttctacgacaggttttcttttctcaagcatgcgagcatcggcatatacgccgtgatcatttttataggattgttcatcgcctggctgttaagcatcgccggtatgatgatcaagcatgccaactttaagatagaaaaaaaggaacacgaattggtcattacgagaggaattattgaaaaacatcaagtgaccatcccgctccgtaaaatccaagccattaaaattaaagaaaatgtgatcaggcagttattcggatacgcgacggttgcgattgtcagcgccggcagtgcggggaatgagaaagaaggagctcagacgattctgtttccgatcatccgcaaatcaaagctcggtgtgatgctgaacggtttcacaccggattacgtactggaagaaaataggaatcatttgccgaaaagggcgctgcgccggtatttattccgctccgttatcttctcggttttcgtgatcattccgctttgtattctgtttaaaccgtgggggtatgcatcgctccttgtgcttcccgtcgaactggtgctgggctacgcctcatttaagagcgcgtcatggtgcttaaacggaggccggctgcagctcaccacacggctgatcgggaagacgaccacgattatgctgagaagaagaatgcagatgtttgaagtcagccgctcctttctgcaaaaaagaaggcggctcgcatctgtggctaccgcagtgaaatcagctcaccacatggagcatgtcatgctgaaggatgtcagcgaggaagatgccgaacgcatcgggcgctggtattcatatgaaaaagcggacggttaataccgccgctttttttgctgcacgcataaaaaggaaagcaaaaatccgcctgccagtccgaacaaatgcgccataatgttaatattagaattgataaacgtcgacagtaccgcgatgataagcagggtcataatcattttcgactggtcccggccgatcagctccttgcggaaaacagtcagaaacacatacacgccgaaaagtccgaaaatcgcgccggatgcgccgacatgcacataatcaagcggttcggcaagatatgtgccgatattgccgataatgcccgatgcgatgtacacaatcaaaaaacggacttttccgagcatctgctccagcgggggcgcgaataaaaagagagacatggagttaaacaaaaggtgagtgaaattcgcatgtaaaaacatcggtgtcaccagccgccaccattctcccgaggaaacgccgtaattatagccggtcactgcatctgaccacatcatgacggaatgaagcggcatactgaaaaacagccacaagaacgcctgcagcgccaagatacagctgacggccggataacgtctgataaaagtctggaaattttccgtacgtataaacatcgcaagcccctttgcatctgatttgttacatatatagtaacacgtttatgacataaaccgttttttagtacggacttttaggaggaattcacatgattttcggaatcggaatcgacatcgttgaactgcacagaattgaaaacatgctcagccggcaggcgaggtttccgcaaagaatattgacggaggctgaatacgcccgttttacattgctgtcggacaaaaggaaaattgaatttctcgcgggaagatttgcggcaaaagaagccttttcgaaagcatacggaacgggtatcggcaaagagctcagctttcaggatatcgaaaccggaaacgacacggcgggcaagccggtgctgacctgcgccaagctggacggcgcggcggttcacgtctccattacccatacaaaagaatacgccgcggcacaggtcgtgattgaaaggttgtcacgctagtctgcatattagccgaaaccccttcatatatttgatagtgcattaagggagacaagttgtttgaggcttttatggtacgcgtccgtccgttcagggcgtaccgttaaagtcaaacaagcgatttcttccctttacatcaattgagaagaaggggttgaaaaaaggtgagaaaaagctttgttttgcttttaacgggactgcttgccgtccttattctttcggcctgcggccaaaaatcacaggaagatatcgtgaacggtttagataagaaggcgaaagaatacacctcgtacaaagcgaaagccaaaatgaccattcagacggggagtgatccgcaagtatacaatgtggaaatctggcataaaaaaccttccctgtaccgggtctatctggaaaatccgaaaaaagaccaaaaccaagtcattttacggaacgccaacggagtctttgtccttacgccgtctttaaataagagcttcaggttccaaagcgactggccgaataacagcagccaagtatatttgtttgagtcacttgtaaaggacgtgcagcatgacaaagacgccgtctattccgccaaagataaaaagtacacgtttgaaacaaaaacaaactatcagcacaacaaaatgctgccgactcaggaaatcactttcaacaaaaaggacatgagcccttcgctcgtcaaagtcatggatacagaccggaaagtgatggtaaaagtcgaattcaaaagctttgaattcaacaagccgtttgataaagactcttttgacgagaagaaaaatatgacgctttcccagatggacgtcgccacaagcgccaagccgtctgattcatttgcggtcaaaacaccgcttcaagtgccggccggcgtcaaaaagcttgaagagaaagatatttcaacggcggacggcaaacggatcgtcatgacttacggcggagaaaaatccttcacccttattcaagaaaaagcccatatcgcaaaagccgcctctgccgtcacgctgaaaggcgaaccggttaatctcggcttcacggtggccgcattatctgatacgtctttaacgtggacatatgacggagtggattatcttctgtcatcacaggatctgacaaaggatgaaatggtggccgccgccaaaagcatgcagggacagtcgtcaaaataatgtcaaaaaagaggccgccgctgtcggtctcttttttgattccatttcactttgcagaataattttagtatgataataacaatatgaattgaaaataatgctaggaagtgtatcgaatgaacacagcatccttttacagagaaacgtgggcggaaatcaacctgtccgcgattaaagaaaatgtcacgcatatgaaaaaacacatcgggcaaaacgtccatctcatggcggttgtaaaggcgaacgcttacggccacggagatttggaagttgggaaagccgcgcttgaagcgggtgcctcttgtcttgccgtagccatactggatgaagcgatttcattgagaaaacggggcattacagcgccgattcttgtgcttggcgccgtgccgcccgaatatgtacaagcagctgccgaatatgacgtaacactcacgggatattctgttgaatggcttcaggaagctgcgcgccacctcggaggtgccacattgccgtttcatctgaaagtcgataccggcatgaacagactcggagtcaaaacggaggaagaaatccaaagcgtgttaaaaatcctcagccaaaatcccggtttagtctgtaaaggcgttttcacccactttgctaccgcggatgagaaaaacagagattatttcctcttccagtttgaccgctttaaaacattgatcgctccgctccctttaaaagaattgatggtgcactgcgcgaacagcgccgccggacttcgccttaaaaaaggcttctttaacgcggttcgtttcggcatcagtatgtacgggcttcgtccttctgctgacatccaaagcgaaattccgtttcaattaaagccggcttttgcgctgcactctgtgttatcccatgtgaaaaagatccgcaaaggggaaagcgtcagctacggcgcaacatatacggcagagaaggatcaatggatcggaacggttcccatcggctatgcagacgggtggctccgcaagctgagcggcacgtctgtgctgatcggcggcaaacggatgaacatcgcgggaagaatctgcatggatcaattgatggtcgaattagatcaatcttatccgccgggcaccaaagtcaccctgatcggcagccagaaggaagaaacgatcacgatggatgaaatcgcagggcggcttgagacgattaattacgaggtcccttgtaccattagttcccgcgttccccgtatgtttttggaaaatgagagtataatggaagtaagaaatcctttactgcaagataatacaaacaagtagccgtcatccggaaaaagagaatttataaaacagctttgcttgacgtttgaataatggtatcattatgtctggatggatgaattggtcgtatccgtaagtttggtggaggtgtatgttttttgtctgaatccagcgcaagaaccgaaatgaaaatcagcttgcccgaaaacttagtagctgaattggatggtgtagcgatgcgggagaaacgaagcagaaacgaactgatatcacaagcagtgagagcgtatgtcagcgaacggacaactcgccataaccgtgatttgatgagacgcgggtatatggaaatggcgaaaatcaacttgaatatctcttctgaggctcactatgctgagtgcgaagcagaaacgaccgttgagcgcttagtcagcggaggataatcattttgattgtaaagcgcggcgatgtttattttgctgatttatctcctgttgttggctcagagcaaggcggcgtacgcccggttttagtgatccagaatgatatcggaaatcgctttagcccgactgctattgttgcagccataacagcccaaatacagaaagcgaaattaccaacccacgtcgaaattgatgcaaaacgctacggttttgaaagagattccgttattttgctggagcaaattcggacgattgacaagcaaagattaacggataaaataactcatctggatgatgaaatgatggataaggttgatgaagccctgcaaatcagtttggcactcattgatttttagtcatattttggttgctcatatagagcaactttttttgttttcgaaaaacataagcgctataataaagaaataatcaaacaaaatttgttgttttgtgtcgggaggtcagtgaaacccatgtcgaatcagaaagtgtatcagttcattattgatcagcatgatgaactgcttgatacttggacagccaaactaaaagaagtaggcaatcaggaagactatcagcttacgaatcacatatgtgaaaatatttgtaaagattatatagacattcttttattatcgacaaaaaatgacgaggctgccgaagagcagatcagtgaactcgcactgcgcgccgttcagctcggcctgtcgctgaaacttctttcagccaccctgtcagagttttggaaactgctttacgaaacgatggtcgaccttaatatggccgatcaggacagagcagatttgattttggaaatagacagctttttcaatccgatcaacacggaaatcttaaatcagtattctatctcctgggaaaaaacggttactttgcaaaaaatcgcgcttcaggaattgtcggctccgctgatcccggtatttgagcatgtaacggtcatgccgcttgtcgggacgattgatacggagcgtgcaaagcatattatggaaaatctgttaaacggcgtcgtaaagcaccgttcacaggttgtattaattgatatcacgggcgtgccggtcgttgatacgatggtggcgcaccatattattcaggcatcagaagcggtgcggcttgtcggcgcgaaatgtctgctcgtcggaatccgtccggaaatcgcgcagacgatcgttaatctgggaattgatttgtcgcaggttattacgaagaatacccttcaaaaaggaattcaaacagcgcttgaaatgacaaatcgaaaaatcgtttcattgggggaataacattgtgagacatccaaaaatcccgatcctgaaactgtataactgcttattggtatccatccaatgggagcttgacgaccagacagctttgcattttcaagaagatctgctgaacaaaatctatgaaaccggcgcaaacggggtcgtcattgacctgacatccgttgacatgattgattcatttatcgcgaaagtgctcggcgatgtcatcaccatgtctaaattgatgggcgcaaaggtcgtattgacgggaattcagccggctgtggcggtcacattgattgaactcggaatctcacttgaggaaattgaaacggcgctcgatttagagcaagggcttgagacattgaagcgggaattgggggaatagcgatgaacgaccaatcctgtgtgaaaatcatgacagaatgggatatcgtagccgccagacagcttggccgcaacgttgcgaaggaattaggcttcggcacggtggaccaggccagaatcacgacggctatctcagaattggccagaaacatttacttatatgcaggcaagggccaggtcagcatagaacaagtaaacgacagagggaaaaaaggccttaaaattatagcagaagacaaaggacccggaatccccgacatccgtaaagtgatggaagacggcttttcaacgtcaggcggactgggagcgggacttccgggcgtgaaaaggctgatggacgaattcagcctgcaatctgttgcagaggaaggaacagagattcaagccgtaaaatggcttcggtaggaggttagaacgtggatttcagggaggttatagagcagcggtatcatcagctgcttagccgatatatagccgaattaacagaaacatctttatatcaagcccaaaaattcagccgaaaaacgattgaacatcaggttcctccggaggagatcatcagcatccaccgaaaagtggtaaaggaactgtatccggatctgccggaagatgtttttcattcgctggattttttaatagaagtcatgattggctacgggatggcttatcaggaacaccaaagtctgagagatatccagcaggagcttcgttcagaaattgaaattgccgcaaatgttcagcagacgctgctgggcacaaaaattcctgaagaagaagaactggatatcggggcgatcagcgtccccgccaagcaaatgagcggggactattatcactttgtcaaagacaaggaatcgattaacatcgcgatagccgatgtcatcggaaaaggaatacccgccgcattgtgcatgtcgatgatcaagtatgccatggactctcttccggagatcggcattcacccctcccaagtgctgaaaaatcttaaccgcgttgtagaacagaacgtggactcaagcatgtttatcaccatgttttacgcaaactacaatacgaaaaatcaccaatttacatatgcttctgcggggcatgaaccgggcttctactactctgaaaaagaaaaaaagttttatgatctggaggcaaaaggattggtgctgggaatttcccaggattttgattacagccaatatgaacagcacatggacgaaggagacatgatcgttcttttttctgacggcgtcaccgaatgccgtaccgaaaacggtttcttagaacgcagcgacattcagcgcatgctggaagaacatatggactgctccgcgcaggatatggtcaaaaatatttacgacagcctgctgagacttcaggactttcagcttcatgatgattttacgttaattgttttgaaaagaaaggtttaaaaaaacggcagcacgggtaaaaagccattagcacgagtaaggataactttcagaggtgatacgatgaatttaacggtagatatgaaggagaatctttcagatatacaaatcaatatcgctggagaaatcgatgtatactcagctccggtggttcgtgaaaagctgatgcccctggcaaacgaggggaaggacatgagaatctgcttaaaagatgtaaactatatggacagtacgggtttaggtgtttttgtaggcgtgtttaaaacggtgagcaaggaaggcggctctctgaagcttgagaatctttccgaccggctcgtccgtctgtttgaaattacggggcttaaggacatcatcgacatttcggcaaagtcagaaggtggcgtgcaatgagtacatcagttgattatatagagatgaaaattccggccgaaccggaatatgtaggaatcgtcaggcttacattatcaggagtcgccagcagaatgggctatacctatgatgacattgaagatttaaaaatcgctgtcagcgaagcttgtacaaacgctgtccagcatgcatacaaagatgaaaataagggagaagtatccgtgcggttcggtgtgtttgaggatcggctggaggtcattgtcgccgatcagggagacagctttgattttgatcagaagcagcaggatctcgggccgtacacaccttcgcacacagtcgatcaattgtcagaaggagggctcggtctgtatttaatggaaacgctcatggatgaagtcaaagttcaaagcaactctggcgtaaccgtggcgatgacaaagtatttaaatggggagcgagttgatcatggcacaaccatcaaaaactacgaaactaactaaagatgaagttgatcggctcatacgcgactttcaaacacatgataataaagaagcccaggaaacactcgtcgaggtgtataccaatctcgtcgaaatgctggcaaagaaatattcaaaaggaaaaagctttcacgaagatctccgccaagtcgggatgatcggacttctcggagccattaaacggtatgatcccgaggtcggcaaatcctttgaagcatttgcgattccgaccatcatcggcgagatcaaacgcttcctcagagataaaacatggagcgtacacgtcccgagacggattaaagaactcgggccgcgcattaaaatggcggtggatcagctgacgacagagacgcagcggtcgccgaaagtcgaagaaatcgcagcctttctcgatgtgtcagaagaggaagtgcttgaaacgatggagatgggaaaaagctatcaggcgctttctgtcgatcacagcatcgaagcggatgcggacggaagcaccgtcacaattttagatatcgtcgggtcgcaggaggaaggatacgaacgcgtcaaccagcagatgatgatcaaaagcgtgcttcatgtgctgtccgaccgcgaaaaacagattatcgatctaacatttgtgcaaaataaaagccaaaaagaaacaggggacattctcggaatatctcaaatgcacgtctcgcgcctgcagcggaaagcggtgaaaaaactgagagaggccttgattggagatccctccatggagctaatgtaatgattcaggttgaagaaaatgaacatgttcaaactcttgtataccaattaaataaagaaggcaagtccatatgcggcgacagcttttttatgaaggcgaatgaagaagaattagtttgcgcggtagcggacggtctcggcagcggatctcttgccaatgaatcctcgtcagccattaaagacatcgtggaaacgtatgcggatgaggatgtggaaagcatcattgagcgctgcaatcaagcgatgaaaaacaaaagaggggcgactgcctccatcttaaaaatcaatttcatcaaaagggaattgacatactgctcgatcggcaacgtccgtttcttcctgcactccccatcaggcgaagtttttcatccgctgccgatttcgggttacctctcaggcaaaccgcaaagatacaaaacgtatacgtcatcatacgaaaaaggggcgacattcatcatctacacggatgggcttgaggttccgcatatccgcacctgcttaaagcagggacactcaatagaagaaatatcaaaatcacttcatccgtacacaacatccagacgtgatgatttgacctatattctcgggcagcttttatcgtaaggctgctttttttatgttccgccgttttttgatacactagagaaagaaagaagagatggaggcttttgtgatatggaaacgttagcccttttgaaaaaacaaattgctgaagaaacagcgttatcccaaaaacatgtcgaaagtgtcatccgcctgctggaagacggcaataccgtcccgtttattgcgcggtaccgaaaagagcagaccggctcaatggacgaggtgcagattcaggcaatctccgagcggtggcaatacatacaaaacctgacgcagcggaaagaagaagtcatcagattgatctccgagcaggacaagctgacagacgggctgaagcaaaaaatcgagcaagcggtcaagcttcaggaagtcgaggatttataccgccccttcaaacaaaaacggaaaacaaaagccaccgtcgccaaaagcaaaggccttgaaccgcttgcggactatattctttctctcccgaaagaaaaccgccttcacgacgtcgctgatcaatatatcagtgcagaaaaagaagtcgcttcaagagaggaagccattgaaggcgcgaagcacatcatagccgaacaaatctcggatgatcctcatttcagaaagtggatccgccaggaaacgtataaaaaaggaattctcacttccgcggcaggcaagtcagccgcagatgacgagaaaaacgtctatgagatgtactacgagtacgaagagccgatccaaaaggtcgttcctcacagagtgcttgcgatgaaccgcggtgaaaaagaaggcattttaaagattgcgatcgaaccgcccgccgatcagataaaagcttatttagaaaagcaaatcatcaaacaccgtgaaacacctgtgaaagaaacgctgaaagaagccattgaggacagttataaacgcctgatccagccggctattgaacgcgatatccgcaaagaactgtcagaaaaagcagacgcgcaggcgatccatattttcgctgaaaacctgcgtaagctcctgctgcagccgccgatgaagggaaaagtcgtgctcggcgtcgatccggccttccgcacggggtgcaaactggcagtcgttgatgagacgggaaaagtgctgaaaatcgatgtcatttacccgcacgctcccgtcaaaaagacagcggaagcccgaaaaaaaatcaaagaattgctggatcggtacgaagtcgaggttgtggcgatcggaaacggcacggcatcacgggagacagagcaattcgtcgttgatgtgctgaaagaaacagagcgggacatttattatgtcatcgtcaatgaggccggagcaagcgtgtattccgcgtcagaaatcgcccgtgaggaatttccggattttcaggtcgaagagcgcagcgccgtctccatcgcgcggaggttgcaggatccgctggccgagcttgtgaaaattgatcctaaatccgtcggtgtcgggcaataccagcatgatgtcagccaaaagcatttaaacgaatctctccgttttgtcgtagagaccgtcgtcaaccaagtcggggtgaatgtcaatacagcatcagccgcgctgcttcaatatgtagccgggttatccaaaaccgttgccggcaatatcgtcaaaaaaagggaagagctcggaaaatttacaaaccgcaaagagctgaaagatatcccgcgtctcggcgcaaaaacatatgaacagtgcatcggctttttgagagtgcccggaggacgggagccgctcgaccgcaccgggatacacccggaaagctataaagagacaaaggcgctgctcaaaaaactgcagctcactgcggatcagatcggaagcgcggacgtaaaagagaaaatcagcgcactgccgctgtctgaaacggctgaggagctcggtataggggagattacgcttgcggatatttgcgggcagctgacaaggccggagcgagatccccgtgacgaagtgccgaagcctttgctgaaaaaagacgttctgcagcttgaggatttaaaggaaggaatggaattgcagggcaccgtccggaacgttgtggacttcggcgctttcgtcgatatcggcgtcaagcaggacgggcttgtgcacatctcaaaactgagcaatcaattcgtcaaacatcctctcgacgtcgtatcggtcggagacatcgtcaccgtatgggtcgaaggggtggacgtgcaaaaaggcagagtgtcgctgtctatggtaaaataaaagcactgcttacgagcagtgtttttttctgtagaaataccagcactggttcagcagtttgatttggtaattgtccttttctaaaaacgctttttgcatttgtttcatcagccaattcggcatggctcattcctcctcagcttttagttagaggtcggttttaacacattgtatgcgaacggtgaattgtcccgttcaatgtttttaaagcggggtgcacatatggataacgaacaacttcaaaagctgacggaagacatctctgcacaggatttcggaaagccgttccgtcaccgggcctttttcaatgaccggctgaaaacgacaggcggccggtacatgctgtcttcccataacatcgaattaaaccgaaaatatctgctcgaacacggacggagcgagctggtaggcatcatcaagcacgagctgtgccattatcatcttcatcttgagggaaaagggtacaagcacagagacaaggatttcagagacctgcttcagaaagtcggagcgccaagattctgcacgccgctgcaaaccaaaaagacacaaaagaaaacatatatgtatagatgcgaggcctgcggccaacagtatataaagaagcgggcaatgaacccggaaagatatgcctgcggaaagtgcagaggaaaaatcaaaagaattttttaaaaaggcttgactcatttcaatgatctgtgttaaattataaaagtcgttgagagacaacgatgctttctcaaaaaaaataaatgttgcttattgacacaatatgtcgcatcatttataataaagaaagtctgatcattccacagtagctcagtggtagagctatcggctgttaaccgatcggtcgcaggttcgaatcctgcctgtggagccattatggagaagtactcaagtggctgaagaggcgcccctgctaagggtgtaggtcgcgtaagcggcgcgagggttcaaatccctccttctccgccagataagttctcaaccagacggcccgttggtcaagcggttaagacaccgccctttcacggcggtaacacgggttcgaatcccgtacgggtcaccatttaccttcgttgggctatagccaagcggtaaggcaacggactttgactccgtcatgcgttggttcgaatccagctagcccagccattttatttaaaaattttgaatcacttttagagcgagccattagctcagttggtagagcatctgacttttaatcagagggtcgaaggttcgagtccttcatggctcaccacttgtcacgcgggtgtggcggaattggcagacgcgctagacttaggatctagtgtcttacgacgtgggggttcgagtcccttcacccgcactttcttttcaaagtgctgatcatcatcactagcttatatgcttagtggaaagacagcttcatagcacgcggtcgtggcggaatggcagacgcgctaggttgagggcctagtgggtgaataacccgtggaggttcaagtcctctcggccgcatcccaataataccaagggtttaaccgcctttggtattttttgtgcttatttttaaatgatctactatccacaaactgcccacttacctggagtaagtcatctacagttgacgtcgcacaaatattttcatcattataggtagttactaatgcctcaaactccaatttgcaaaaggcagagaaagtattgctaagcatggaggaaaacaaagaggccttgttatattatcagctattagaatttagacacgagataatagggtaggggcataaaggtactgaaaaggcttaatcttttttaaaaggttaagtctttttttggctataaatgtaatcggtgcccaattatttgccctgaattcacgaaaaaggataaaataggtgtaaataaagttgatattttaaaattaattcaattcattatcgtaaaagcaataataactaatcggcgaagaaaggataatcagtcaaatgaaaacattagttatcgttatacaccctaatttggaaacgtctgttgtcaacaaaacctggatgaatcgtttaaagcaagagaatgacattacggttcatgacctgtacggtgaatatcctaattttatcattgatgtagaaaaagagcagcagctcctgttagatcatgagcgcatcgtttttcagttcccaatgtattggtacagcagtcccgcgttactcaaacaatgggaagatgatgtgttaacacatggttgggcttatggaactggaggtactaaattgcatggcaaagaactactcttagctatctccttaggcgcacaggaatctgattatcaagcaggcggagaatataatatcacgatcagcgagcttatcagaccgtttcaaatcactgctaactatataggaatgcgttttcttcctgcctttgcacaatatggtacacttcacctttcaaaagaagatgttaagaacagtgcggagaaattggttgactatcttaaagctgagcattgatccggtattcgcgagggaagctgaaataaactaattacagcagggcgatgagtagatatttcttgttgaaatgtagatttccttggtctctaataggtgcccagtttgtgctcggaattcatgaaaaatgatgaaaataagtataaataaaataaacagatgctttgaataaaagcttttgaaactcatgataggtttttactaggttgagggcccagcgggtgaataacccgtgaaggttcaagtcctctcgccgcatcccaatgataccaagggtaatagagagatccttggtatttttttgcgcttatttttaaatgatctactgcccacaaactgcccacttacctaaagttcaaagtgatcaaaatactcaaagtatctggacaatactttgcttggttcttatttgtcgatagtcgcagtaacgaaagcactaaacaacacattaaacagattcttttgatatgacggacacatatgacagtttgcgattgtcgaaattcaatgtataacccttgttcaacttaccaagttcagttaaaagtttgttaaaattgtgataaatgtatgaaaggattaaatgttcatgtcgaaacattaggattacagggaaggggaacaactacatgtcgatttaccataaagtaattggagatggatatccgatcgttatgttgcatggttggacacttgaccatcaggtgatgttaaatgcaatggaaccgttattcgagaaacgaagcggttggaagagaatatacatagacttaccaggtatgggacattctaagccacaaccatctattcagaactctgatgatgttttagaagcgatattgcgtcttttggacgagattattcctgatcaacagtttattgtttgcggtaattcatatggagggtacattgccagaggtatcgttcgttcacgtaaggaaacagttcgtggattactgctgatggcaccattaactatacccgaattcgatgaaagggtagtaccgcagaagactgttctaaaaagagacagcgacttgatatcacatttgtcttcagaggaggcgaatgaattttgctctatggggattgtgcaaggtaaaactgaatgggagaggtttcgggatgaaattttacttccatctaaacaaacaaattatgaattcgtaaacaacattcgtcaaaatggatatgggtttaccttcgatatttcatctaaacttgattatcccacgctaattatcacagggcgtcaggacaatgtagtcggataccatgatgcgtggcggctactcgaagattacccaagggcaacttttgcagtacttgatatggctggtcacaacctgcaaatcgaacaaaccgatgtatttaattcattggttcacaactggttaaacagacttgagtcggaaaattttcggttggtataactttccataagtataagtttactgttgcaattaccaattagttaaacaataattaagataagcaatattggggtttcctgaaattttagtaattattagtctttattgtcattggggatcatttaatcattgaacaaaaataaatccattaccttaaaaaatgttactttatttccagctggataaaaaaattttgtcaggtgtcatgcaataaattcaattgtcggtgattgactgtttaaataaaaccattatttcataccctgtgctacttatttctgttgtagtctaaggtaaagaaagttgaaaaggtatacgaaattcgtcatacaaattaaagttttgaatgaaagagcaggattactcctgctctttttctttctaattgggctagattaaacgcagacggttattccttgggaaaaacaaaaaaatttcttctatccattgactagcttggctttagcctggtttctatcaccccgttgggcttgtcaggttttaaaaaggtatgctacgtttatagtgttttgtttcacctgattgtggggtaataaagatagaatcagtaaataattcttaggaacgacctcaatcttataataaacatattggaagacgtaatggaagatctaaaataaaggtttaggctactttgaagaaataaaagttttttttcgattgtgatcatattcacaatagagctgtatgaaggggaatcatttctccaaatcgtctgcagaaaataccaaccacaacccaaggatatctcactaaccgcttaggctggtattatctgttggctgtttctctttttgttgcttcttgtattatttttagcccaatcggcaaaaataagttaaggaaaccagcgaaaacacttaatttcatccttctttcctggtttacaatgttatttggcgctgatatggatattagtctagtcttttaaggtacagttgaaccaatcagccactatgccgttagctctccatcaggtgaaacagaaacccccggacttttagagaagcattacgctatacattctgggactgcatgctcggaccgtttacgcgcttgtataatgtggatttgataattaaggagtcgatattattaaatgaagtttaacaagaaaaaaattaacgttgtagacattcaaaaagcgaagaaaagcgtgtttgctacagggataggaaacgcgatggaatggtttgattttgctttatattcttatttggcagttattattagtaaaaactttttcagtccagttcaaaacgatgaattaaagttaatatttacttttgctacatttgcaattgccttcttacttagaccggtaggcggaattatttttggtaaaatgggtgataaatttggtcggaaaatagtattaacaattactattttaatgatggctttatctactttaataattggtgtgcttcctacctatgatcagattggggtatgggcccctatattattactctttgcccgtattctgcaaggcttttctgtgggtggagagtacgctggggcaatggtatatatcgcagaatcttctccagataataaacgtataaggttaggcagcggtttagaaatcggcacattatctggttatatagtagcttctgttttagttacagtacttttctggactttatctgatgttcaaatgaatagttggggatggagaattcctttcttcttaagtattccaataggattatttggtttatatttgagaagtcatctagatgaatcaccaatctttgaaagtgacatctctgaaaaccaagaacaacaaccaggtttattagaagtcattaaaacatataaaaaagatatctttttatgtatcgtatttgtggcatttttcaatataaccaattacctattattagggtatatgccttcttatttagatgagaaccttggtataagtgataatataagtacaccggttacagcaattgtattgattattatggtaccgttcgctttaacttttggtaaactgggagataaattaggaaataaaaaagttataacaattggattagtattaggaattgtattttcaattatctcttttcaatttcttaatatggggaatataacattcttatttataggacttttaatgttaggtattgtattatctgtatacgaaggtactatgccaggatctttacctacgttgttccatactgacattagatatcgtacattatcctggacattcaacttatcagtttctatttttggcggaacaacacctttagttgcttcttggttaacccatgtgacaagaaacaatttggcgccgggtttctatttattggcagtcagtttaattggcttaatagttgtgttaaccttatttaaagatacttcaggtaaatctttaaaaggttcttacccaacagttgcttctaaagctgagtttcaagaagctgttgaaaatccaaaagattcactgtggtggaaaatggaacaaacagaaaaggaatgaaaaaaacatccatttaattgaccgactactcgaaatacagactcagaataagctgggattatccgagcagcaatgactgcagctcttttatattctggagggcttactgctttgcaaatgcagcgttgctattctcgatcgtcattattttattggttgtgtcctaataataaaacattgacgcaagaacgaagagaaattaaaaggtccgggcaatacagcaaaataagaagcaagaagctttgttatgccagttcttctcccgaaggagagctggctttttattttctgtatggggtccaaagcagaaaacgagaacttgtacgctaactaatcaacaaaggttttttggatatgaagagggtgaactggtgaaaaaacggagtttgttgtggagttagcttttcaattagggacatctcaacaacaaaataataaccagcccgattaaaaagctcatcaaaagttccattattccaatatacgatccactcaattatttgagtggatctgtttgttttttatttatttgcagcagtctctatgtgacgaaacaataaatggattaaaaccctttacgcagccaggttgcggcgagatcaattgctccgcgcgcagcttcagttttagctaaggcgttgagcatcacgaaatcgtgaatgatagcttggaaacgtacggcagtgaccgaaacaccagcttcacgaagtttattggcatatgcttctccctcgtcacgaagtacatcagcttcagctgtgataatcaatgcagatggaagcccttgaagctgctcagcagttgcacgcagaggtgatgctgtaatttcagcacgctcgttcgaattggttgtgtactgatcccaaaaccacatcatcgcgtccttgcgtaaaaagtatcctgcagcaaactggtgataggattccgtatcgaaagaagcgtctgttaccggatagaaaagtaattgttgccggatattcaagtcacctcgtgctttggccattagcgtgacagcagcagccatattgcctccaacactatcacctgcaattgttagactctcgggaatcatgccgttctcacggccattttcagatgcccacttcactactgcatagatttcttcaatggctgtcggatattttgcttctggagataaggtgtaatttggaaagacaatagcagcttgtgctccgactgctagctcacggatgagccgatcatgtgtatgctcattaccaaatacccagccggccccatgaatgtacacgatgacaggaaggtgcgcaggcgcattctgcgggcgcattattcttactgatacctgtccgctcggtcctcctgaaatcataacatcttcaatatcaactggcagtttatcaattggggcagattgaacctcatctacagcttctcgtcctttctcaggtccaaggtcgaatagatagggtgggttcgcggttgcttctgcaaattcttgagctgctttttctaattgtactttctttaacatcaatctcactccttatttgaaggctggtcacctatatgttttaatcaaatttttttattctattacctattgatcttggcatctttcgtcttacattgctgttgtaatgatttgtacatcaatatttccgcgagtagctttagaatatggacatacttgatgagctgcatgtgttaattcttccgcttgctcttgagataccccttgaatttccacctccagaacaactccgattttataaccattatcactttcatcttttaataaacttactttaccggtaacagctgattcgatttttaatcgttgtctctgggctgctaaatgaagagcactgtcataacaagctgaatagcctgccgcaaataattgttctggatttgtagccgcggatacttgatttggttttggcatagctaaatccaaatcaataataagatcattagatgttacatgaccttctcttccgccttttgttgtagcttctgctgtaaaatatactgtcatcatcaaacactcctataaattaaatttaacacaattgaattttaatcaatctaatcagcgttgtcaattaaattttttgaaattaaattgctctcaatttaaattcgcaattaaaattctctaaatgaatgattagactaaaataaagaacagttttccgcagtttaaagttagtgtacataataaccatattgagaaggtggctcaataaatctatgagtcggtctaaacaatatagtggaagtatctatatcggtcataataagaatgcacctcaaacacattttggttataaataaagtttccatgtatataagttatggttaattaaattgtcagtcattcaatttcccttaatgtaattcttatgctattatgtgtagtaatgaatataaatattgtgaggaatttaacatgaagaatgataaattactgttaagtaatcatctatgttttgcgatttatgcagcttcccgtgaaatgataaagttataccatcctctcttaaaagaattaggaattacgtatccacagtacttggttcttcttgttttatgggagaaggaaaaaatatctgttaaaggtttaggcgaagaattatatctggactccggaacattaactccagttttaaaacgacttgaggagcgaggtcttattataagagagcgttcaaaagaggatgaacgaagtgtaattattacgttaacaactgaagggaatgagtttaaagaaaaagtcacaatgatacctaatgcagtatttgataaaaccggttgtaatgaagaagaaattaaaagttataacaaggaaattcgtaatttacttcacatgctgacaactgagcaatagttttatgaatatagatggcgggccaagcgggtgaataacctgcggaggttcaagtcctctcggccgatccctatgataccaagggttttgacacccttggtattttttgtttataaaaattcatctgttactgtccacttacttatagtaggtcgtatgatttgtcagtcaccttcatccttctgctgactgcgtgcggcggtagtaaatatgataatgcaattaatgaagtgatgaagcaggagaagaaagtcagaaaagaaatgcgagcagattcagatgagtacaaaagagataacgccataatttctgtatatgatgacggcaagtatattcagcgttttatcagccagaagaaagttctcgtaggctgactgcttattcttattatgagaagcttggagattcttatgaggaaatggcacatatgccgggtgatggtgatggcgaccgccttggtctttataagaaaacacctgattataaagaggttaaaggcaaggaaacaaaaacaatgtgcttgttcattcctgataggggaacaattgttttaccgttaagttgttgtgtgagagccagtatgttaaaatgctacgtagatttaataataaagtttagattcaaggagatttatttatgaagttggatgaatttaccatcgggcaggtttttcaaactaaatcttttgaattaacaaaagagaatataatgaattttgcagaagtgtatgatccacagtacatgcatttaaatgaagaaaaagcaaaaatgggcaggtttaatggaattattgcttctggaatacaaacgttatctattacttttaagctttggattgaagaagggtgtcatgaagacgatattattgctgggacaggaatgaataatataaaattcctagcacccgtttaccctaatgataaactgaacactattgttaaggttattgataaaaaaccaaataaaagccagacggggatacttactgtattgttatctacctataatcagaaagaggaaaaagtgtttgaaggtgagttatcagtattaattaaacgctaaatgacctttgcggcatatcatcgtcacctttcattttttataggtgtctggatgaaatgagcaatcatcttaattaattgagtggattttgagtctgctctttttttatttgttcaacctatgtcgagaaacaaaggactcacaataacgaaaaaatcatctcgtaaatacgaatttaaaaattgctaccttgaggttttttgcatattcctctgtatcattgcaccggatgaatatctataatgagcgttctatccttcgatgttatgtttcctttttactttttggttttgtcagttcaaagctgtactttaccatgtcatggatttgatgctctgggagtccctcatctaaggtaagcgtattccaatgctccttgttcatatggtatccgggcttgatttcttcaaaaagaccacgcagaaaatcagccctttcaggttcgcatttaaggttgacacataagtgttcgtcgcgagtgaagataagtgcaaatattttcttattccctttgtgccgaattgcagtccaaccatctccaaaagggtggtcttcataagagtttggaaaggttaggcagtaatcttttatttcatcataattcattatcaattcactccatacctcattatttttatatacagaacatattcgttcaaactaagatttgcggtttcttttataccaatccgagatttcctcaagtctttgtttgaacttagcttctgaaccttgagttgttggatagtaatactcacgccctattaaagaatctggcatcgtgtgcattgtcgttaattttttctctttatcatgagcatttttatatcccttaccgtaatctaaatctaaaatcaatatcaattcggggctggattcaatatgatccagtccctttttgttttattgatttttcttatccccagtctgataaaagattttctgtgaatcatttaacaattatcggccgttttttctttttcgataatatcctttaccacatcctcaattgttatatgtccaagagctttttccaaggcagattgggcgatttcaaatattggaccaattgtactttgtatgttccggcctacaggacattgaggattgggattttcatgtatactaaacaattctttatcttgaacaacattaactgctctataaacatcaagtaaggtgatttcagttaaatccttcgctaattcagctcctgcaatacctggccgtacatttactaaacctgcttttttcagcatccccataatttttcttattaaggcgggatttgtatttacacttccagctaaaaattcagaagtgctaattccgtcttcatttatttcaataagagccaatatatgaattcctacagcaaaacggctgctaatagacatgatttcttcaccatcctaattactttacactctttatagtacacttgtaactgaatgtattacaagtttatttcactctaatatgctcaattaacaaggtgataaaagtattgacaaacaaataaggtgtaactaaaattattacatgtaatcaatttggttacatttaaaattttgaatgattaggaggactttaaattgaaaattggaatcattggtgcaaccggaaaagctggaagtcttatcttgaaagaagcggtaagcaggggccatgaggtaactgcaattgtaagagatgctgcaaaacttaaagaggaaaaggtttcaatcattgaaaaaaatataattgatcttacatcggatgatctaaaaaagttagatgtaatagttaatgccttcggagctccattaggagaagaacaggcacatgtagatgctggccgggcattaattagggcattaaaaggaataggtacaagagcagtaattgtaggcggagcagggagtctttatgtagacgaaaataaaactgtcagtgtaatggatacacctgatttcccggagatttttattccaacagctaaagggcaaggtcgtaacttgcaagagctaaaggaaacttctgatataaactggacatttatcagtccttcagcggtatttgacccagacgggaaaagaactgggttttatcagtcaggaaaagatcatcttcttgtgaactcgaaaggcgaaagttatatcagctatgcagactatgcaattgcagtattggatgaaatagaaaatccaaaacatataaatgaacgctttacagttgtgggagaagctgaataagttactgagtagaaacaaagggcgccattagcgtcatcgctaatggtatcttcctcctaagaatgtacggagacattgaaaactttgcaatcagagtagctgattatttttatgaaaaaggggatttatcacgttccaatgaatattatcgagctgatgacagagtaggcgcttagtgagttggatcaaaaaataaatagctctgactaaaacctttgcgggttagttagagcttttgtaaacccactcgttttcgtgagtgggctttttaaaaatacacctctcaacatgatatttattatttagtacggtaaggggtccgtcaaaacttctaatttccaaatgaaggttctcgcaaaaaaacctgccgcacgtttaacaaataaaaccctgaatgaaacatgatattaatttgcagttatttccgtttcgtgctatgataaaggagaattatttttgttcgtgtaaaggatagtatgaatatcgacttttcgtcttgatgatactttgggcaaggatagtaatacaatgtgtaatacactaggaggcaacaaaaatggaacaaggtacagttaaatggtttaatgcagaaaaaggttttggatttatcgaacgtgaaaatggagacgatgtattcgtacacttttctgcaatccaaagtgacggattcaaatctttagacgaaggtcaaaaagtaacgtttgacgttgagcaaggtgctcgtggagctcaagctgctaacgttcaaaaaactgcttaatcttcaatcgtttatacaaacaggctctttatatagggcctgtttttttatgttctctgtatcatactgaataaaaaaccctactcaccgttcgagtagggacagatgctacaaggtaagaaaaaggtttaaaacctcaaaggattgtttacagtataacataccggattgacgatatgtggaatatataaatgatttgtttttatgttctcaaggtaacggtatgttattctttgttacaattcgcatatcttttttatgaaataagataaacaactgctattcactgtcgcaagagatgtaagaaattctgaaagataaaggggagagtggttgttttttcttccggaaataatcacttagacctaaaacaatgaaagccctgcctctcttccatcgttacggctccttgtccgtgccagggtgaatcaggattacaaaaatcaagtgactatttcatcgagaattcaagtgttcgttgaagaaaaaaatataacagattagattgaggagtaataaaagcggttaatgtttaaaaagtaagttgaagaagttgaacgtctgatcgtaatactctgaaaaacttatctgtcattaaccttaacagaaactttttatttgtttttcagtgattcctttaatgacttccagttcactaatcaaaaattcatatgcattatccaacatttttttcgcttgaattaagtgctttctctttcttcatacgcattaaatcacgtacaacttcagcgccttcttgtgattaaacaggggatactaatattaactctttaaaatcattctcatgccgtcttgaaaattgacagtatacctgtaagggtataatattgattcacaaacattatctagttaataatgtagtgtgataaagcgcagtatgaaatgatagtggataacatgcaaatatataaatttcaaagaaggagttcaacgcatggaatatgatcaaaagattaaaaatcgcttacgccggatagaaggacagataaaaggtgtattgaccatgatggaacaaggaaaagattgcagagaggttgtgacccaattagctgcttcacgtaatgcgatcgatcgagcaatgggtttgattgtgagcacaaaccttgaacattgtgttcgtgaaagtttagaaaagggagaagacacacaacacttagtaaaagaagcggtcgacttattggtaaagagccgataaaaaaattcatcaacctatcatctttaaggttgacgaatttttatattcattataatatacccctaccggtatttaatatgttgaattgaataataggagatctttcgaaaaaatttttaatttcaatatacccccaggggtaatagtgattggtcaggagaataaacatgacaaaacaaacaaaacgcacaacaattgttttatttagcggggaatatgataaagcaatggcagcctatattattgcaaatggtgctgctgcctacgatcatgaagtgacgatcttccatactttttggggattaaacgctttacgtaaagaagagctgattccagtgaaaaaaggatttcttgaaaaaatgtttggaaagatgatgcctcgcggtgccgataagatgggtttatctaaaatgaactttgcaggtatgggccctaaaatgattaaaaatgtgatgaaaaagcataatgcacttacgttgcctcagttgattgagatggctcaagaacaaggtgtaaagctcgtagcttgtacgatgacaatggatcttcttggtttacaggaaaaagaactattagatgatatcgactatgctggtgtagctgcttatttggcagacgctgaggaaggcaatgtcaacttatttatctaatgtgatccattgcaattgaataagtgaaggggggatataacactatgaatagcggagtaatgttcaatactttggatcgtatttcgacgttttttcccattgcatggtgttaaacaaataacaactgctgatttaaaatcggaggcggaaaacaaagacaaacagtttatagatgtgcgaacttcttatgagttccgtacaaggcatattaaaggattcaaaaatattcctttgtctatcttgcctcgtcaaactcatcaactttcgaaagacaaagacgtctttgtgatctgtcaaagcggaatgagaagtgtaaaggcaagtaaaatattgaagaaacaagggtttaaaaacatcacaaatataaaaggcggtatgaatacatggtattaacatccagggaataactttttgcatatttatatacccccgccctatataagaaaaggaggaaaaaaaccgtgaaagcaaatattgtattagacgctaaaggtttgtcatgcccaatgcctatcgtaaaaacaaagaagaaaataaaagaattaaaagctggtgacctattagaaattcaagcaacagataaaggatcggcggcagatctgcaagcatgggcaaaaagctcaggccatgaatatctaggtactgaaacagagggagaagtccttcgtcactttcttcgaaaaggaggagagcattcatcagaaaatgcatcttcaattcctgagatttcattagaagctttcacacagaaagtggatcgtgatgagtctcttcacattttagatgtacgagagatagaggagtatgaagaagctcatatccccggagcggtgcatatccctcttggcgaagtggaaaagcgctttaacgaattaaacaaaaatgatgaaatttatattatttgccattcaggaagaagaagtgaaatggcagctcacaccatgaaaaaacaaggttttaaaaaggttattaatgttattcccggtatgcgggactggacaggtaaaacagaaaaaggaggtatgtaaacatgaccgtgcaagcacttaccgcaaaagaagtcacacaaaaaatctttcacaaagaacctttatttattttggatgtacgtaatgaaaatgactttagcgattggaagattgaaggacatgattttaaccatttaaatgtaccgtatttcgatcttttagatggcgtagaagatatcttggagaaaattccttctgataaagatgtgctggtcgtttgtgcaaaagaaggttcatctgtcatggtatccgaaatgctttctgaagcaggtcattctgtatcctatcttaagggcggaatgaaagcatggagcgaacatttagagccggtaaaagtcggggatttaaaagatggcggtgagatgtatcagtttgttcgaatcggtaaaggctgcctatcatacatggtcatttccaatggtgaagcggcgattattgatgcgacgcgtatggtagatttctttatggattttgcgaaggagaagagtgcgacgattactcacgtatttgatacacatcttcacgcggaccatatttcaggcggcagagtcattgctgaaaaaacaaaagcagcctactggttaccgcctaaagatgctgaagaagcggtattcgattatcagccgttggaagaaggaaacgacatgaccatcggaaatacaaagattaaaattcaaccgatttattctccggggcacacgattggttccacttctttcattgtcgatgatcagtatcttctttcaggtgatatcttgtttattgattcaattggcagaccagacttagccggtatggcagaagattgggcaggagatttaagaacaacgctttatagccgttacaaagcgttgtcacaggatttaattgtattaccggcacactttatgatcattgacgagctaaataaggatggaagtgttggtaaaaaactaagtacattatttagcgagaaccatggtttgaacattgcggatgaaacagaattcagacacttagtaacagatcatttgcctccgcagccaaatgcataccaagagattcgagaaacaaacatggggaaaatcagcccagatgaagaaaaacagcgtgaaatggagattggtccaaaccgctgtgcaatacggtaactcaagtttctattaaaaagaggagagatgaacatgaaatcagataaagtattagacgcaaaaggtctggcatgcccaatgccaatcgtcagaacaaagaaagcgatgaatgaactggaatcaggtcaaatattagaagtgcatgcaacagataagggagctaaaaatgatcttgcagcttggtctaaatcaggcgggcatgatcttttagagcaaactgatgaaggcgatgtattaaaattctggattaaaaaaagctaatgaatgtgaaagggtatcgaatacaaagatgccctttttctttgaaaggaggaaccaaaatggatattgcttttatcacaactcttttcattatagggtttattggtgcctttatttccggaatgatgggtattggcggatcagttattaattatccaatgctattatacattccttctttagtgggagtgatgtcattaactgcccatgaagtttcagggataggggctattcaagttttctttgcgacacttgggggtgtttgggcttatcgtaaaagtggttttttaaataaagcattaattatgtacatgggaagcagcatccttttagggagtgtattggggagttacttttctcattatatatctgaaaaaggaattaactttatatacggaattctggctatactagcagttattttaatgtttatacctaaaaaaggacaagaacatagcgaagacgaagaagtgatatctaataaatggttggcttcgtccctagcgtttctcattggcggcgtatcaggtattttaggagctggcggcgcctttatcctggttcccattatgttatcgattttaaatatccctgttagaatcacagtcgcttcatctcttgcgattacatttctttcatctattggcgcaacagttggaaaagtaatcacgggccaggttctttttacaccggctctggttcttatgattgccagtttgattgcttctcctattggcgcatctgttgggcaaaaagcaaatacaaaattcctgcaatggattttagcgctattaataagtgcgacagctattaaaatttggttaaagctcctttgatatgagtcagcgggtaaaatgaaagattaaaagattcatcacccgttggtttcttattaattctttttgataatggtgacttgggcaagtcttgactatagtaccgtgaaaaacatttgacttagttgcgtccagtatttttttgcatttaggacagcgttttggaacactataaacctgtacgttttaaaacgaagatggtgattttaacaaacatggcacccaagacatgtcatgtaactttctggtgatgaaaaaaacgactccatttttactccacaatatgaattaatctttgtaaaataacatgatcaatataaacacacactaatatataaaggttttgtaatagaaaacacagtttcactttattgatggcccagcgggtgaataacccattgaggttcaagtcctctcagccgcatcacaatgataccaagggttctgaggtttttggtattttttgtttgcggctgcgccgttacttaaagcaagtcgtctggtttgccagctatcttttttaaagccctttttcaattaatgaaatgataaaataggagaagaaagccagaaaagaaatgagagcagattcagatgagaaacacaagaataactcatcgtgatcgtattcgtacacatttttacagaggaggacaattatgattggaatactggcaggaatggggccaaaatctactgggccatttgtagataaagtcgtagacgagtgccaaaaaatatatggagcaatacatgacacggattttccacatatgatgatttattcctgtccgacacctttctacatgaataaacctctcaatcatacggacatggaaaatgcaattattaagggtgctgtaaagcttgaaaaaacgggtgttgattttattgccatcccatgtaataccgcacatctctattttaatcaaataaaaaaatcgatttcagtccctttactgaacatgattgatgaaaccataaaaaaaatacctaaaggctcaaaaaaagcagctcttttagccaccgttcctacggttcaatccggaatatttcaagaagcgttaaacagagaaggttatgattttttacatcaagatagttggcaaatctatgtcgatcaaataatagaaaaaattaaacaaggtcaaatcgatgaggctggtacattatatgatgaattacaccatgacttagcagaaaaggctgatacggttatcattgcatgtacggatttaaatatggtcacggaccaaaaaagaagcggacttactattgttgattcatcagcctgtctcgctcaagccattgtaaataagtatgtatcattaacaaaataagtcatctgatttatcagcaaattcagggcgctttttttcctttaaagcgcccggcttcggcagatgcatgatcctcaattacttctttgaatgtaacttccccgtgttattgttcttttaacattgaatactttcgatacgttttatagaaactgcagccaaatagaacagccataagggcgggaagcgacctcaacagggcaaatggagtttcaaataaaaatgctttccaaaacattgcgctttccatactccacagaccttcagttaaatataaacccgaatccttgtaaatcaaataagaataaaacaagcacagtaaaccaaaacaagatgaaaaccccattagtcttttataataattactctttgattggcgatccgaaaagatttcattttgatcatcattttctttttgccaataccgagttccgctaagccatgggctgtttatataaacccagccgaagtcttcatagatttctttgtactctttaaattttttctttgataaacaatcttgataatccagtctcatcacatattttttgtcggttttttcgaaagtgtatattcctaatccgctgatatttgtacagcgatagcctttttgtagttgctcgttcagccattgctcctctttttcaatatcaaaaaacatcttaaatttcttcattcgattcacttccttcgtgcagggataaaatatgcagtaacctgttttgttccatcttcaaaatggcgcttccttccgcagttatcatataaacctttctccggcctgattctccaacaggctcaatccagccatgcttattcaaattttcaatcgcgccgtataatgtgccggctgctaaaataacagttccgttactcatcttttctatcttctgcatggcggcatagccatgaagcggctcacgcagagctaataaaatataatgcatggtttcagacagcggtaataatttatgtttcatatcctcatcctctattcagttcgactatatagttaaacttaatacagtacaactgaatagtcaatggccttttcaaaatttgtaaaaggaacttgaaaatcaaatctaaaagtcgctttctttacgtaatgggaagcgacttctggggcagttctattcaataaatggcccgattgaacgcattaaaaataccaagggtttgagtcccttggtattttttgttcattgtatgatgatgtaaacttcttgcttatttagcgctgtcgttccagtttttctctataaatgtattcgcaggctgtaagttggttttgtttgcaatttcaatgacagcgggaaccacggaagggtctgttttggagaagttaggaatccgcggatctaaccggaaaaagcgatctcccagcagattcgcgctgaccatggattcatagtagccatttccgccggagatcatctgaagaaatggcagtaaaggttcattaggcgacctgtccaaaaggactccccaatttggaggaaggttcttcagattttcgggacgtatgttatccgcacttaccattccccatcccctcgtatctcttcttaaccgagtcggggcttcacctgtaccgatggatagcgccgcaatttgatccaatggcacgttggctttaccaaccgcaaacgcgatactggccgtactggggttcgttgccactacatatccgtccacgtagttttgataggcgcgctgtgtcgcgggagcaccgctgctccgcagtatgacatcactcactttctcatttaaatagggagagccgggaaagttgtgaaataatacgggcgtccaacgatccagtgccggggagtataatttgaatgaagggacaacaattcgttttcttacatctttaagacgaaggcctggcgggaaaaagtttcgtaccgctttaataaaaccggaatagggtaattgctgattaaaaacaggtccgcccggccgggaagtgctgaatgcgggcaggatttcatcctcaaaatactgaagtgtttccttcggagatcttccgcttgctaatgccagggcagtaaatgaaccgattgaatttcccgcaaatacatgggttcggcttattaatgccggattttcttcagccagtctgttcaatagttgtaaacttaaagcacctaaggtaccgcccccgtcaaaggtcatgatccgatattttgccaaagctgatttctcctttctgatgaaaactatcattcagtatatgttcagccagagtctattgtatggatgaatgaatatctccttatcttaaaaatagtttgattatcaatccggcgagtcgggaaaggatatgttttttatttgaagaggttttttccgggaagaaggagaattattatttaaaaataaaagggggaaaatacttgaatacaattgaccttattgttttacattttgaagaggtaagacggcgaagcatcaagttatggacagctgtacctgaggaaaaaatggactggcgcccggactccgaagccatgtcgtgcaaggaaatgataagacatgtattagaagcggaatttctttatcatcaaattttaatgaaaaatatgagtgagttttcagaggaaactattaatccttatgaatcaaaaacgtttaccacagtaagcgaagaattagaatttgcaaaaccgtatcgggccgcgtttttgacattcatcaaatcgttaaacgaaacagatttaacaaatataaagattgacaggtctgatgttggatatattcgcgaactgggagacatgttattaagaatcgcttaccatgagtctgtacataccggtcagcttttagactacctcagaactgctgaggttgacaggcctttaatttgggactagttaaatgattgagttttacacgggaaggggaaagaatggaatataaaccgattaatttccaagagaaattatctgcattccaagatcaatggtctccaaaagtaatcgctgaaatgaatgattatcaattttaaacttgttaaagtacaaggggattttgtttggcataagcatgacgaaacagatgaagtctttattgttattaagggtaatttaatcattgaatttcgtgatggaaaagtaaaattaaatgaaggtgaaatgtttgtcattccgaaaaatgttgaacataaaccttatgcagaatcagagtgtaacattttgcttgcagaacctaaaggtgttgtcaataccgggcaggaaataactgatcaaacagctgaaaatgatgtctgggtctagcctgtaacaaaaaaacgatcaaaactccgaaagatcgaatgacgattagagaaaatgatcaggaaaaccacttaagaataatttaaggttaaatattgaaaaaatttgttaatattataatatattgtttggaaatgtaatcttttataaggagttttctaattgcgttggagtaaatggttcaatattttttgcatagcagcattgggatcaatatatggctataaattgtttactaatcaagaagtcagtacggctcgtgtaatcatagctgctgctattatcttgtggaacattgtcggactttttagcaaagaaccagtaaaacaaacacagcaagcaaactaaaagctaaaaaatactttccaatcgttcaataaaaagttggtacagaaggatgctgcagcgtgcagcatcctttttatcatttttacaaaaaaaccaagggtttaaccccttggttttttcgtagtctccctttttacgctgcttaagataatcgtcaaaatcattcaagtttcatgcaggcatccagattctgttgcaatgataaatgaaaattgccctaaaaatgtgccggttcatcaaaataccagtccaagctgcagatctttctttacatagtatgtagagattaaaaaatgagagaaggagtggcgtaatgtattataacgatggtgacgatcaacagtacttccagaagaaaaagccatacaacgaggcctgtgaccttggccatgattttgatatggcggacgacgatgcaagagcggaagcggcaagagaagcagaagcgagagccagagcggaagaagccatagcaagagcggaagaagcaagagccagagcggcagaagcagcaaaagcagcagctgaagcaaaggtagaagcggcaaaattagcagccaaagcaaaagcgaaatgtaaaaaacgtcataagaaagagaaaaaacatgattgcaaacgtaagcacaagaagaaaaaataagagcttttcatcatgtaaaagataagattcaatgtgtattgattttatccgtacaggggtgcaaaaacgataaagaaaaagattcttgtcgggggatcaaacagaaagattgctcagcagaaccacgcatggcagggcaaacataatgttctatggacttccatagtttggtcgggatatcacgccaataaatgtaagtgcctatcatggcaggagagacaagagtttcggcaggttgccgcacttgtcttttttttgttttttctcatcttcgcgtatatgtatctatttttaagtttgcagaacatctgtctaagaatttgtccaattcctacatatactggtatgggaatcaaatgcttattgggagtgaaatagatgggatcagcacagttaacgggacgtgtcatcttcaaaggggaccccggctatacagaggcggttaagaattggaacccttatgttgatgtctgtccgcttgtctttgtttttgcgcaaaattcatacgatgtaagtaatgctattaaatgggctcgtgagaagaatgtgcctttgcgtgtcagaagcggccgccatgctctggataaaaatctttccacggtaagtgatgggattgttattgatgtgagtgacatgaataacgttttcttagatgaaaaaaacgcggtggcaaccgttcaaaccggcattcacgtcggcccgcttgtaaaaggtttagctcgggaaggttttatggccccgttcggagacagtccaaccgtcggaatcggaggaatcacgatgggaggcggatttggagtgctttcacgatcgatcggcctgataagtgataaccttctcgcactgaaaatggtagatgccaaaggcaggatcattcaagcaaatcattcccgcaatgaagatttactgtgggcttccagaggcggcggaggaggcaatttcggatataacacccaatatacgttcaaagttcaccgtgcccctaaaaccgcaaccgtctttaatattatttggccgtgggaacagttagaaacggtattcaaagcatggcaaaaatgggcaccgtttacagacgaacgattaggatgctaccttgagatttacagcaaagtaaatggtttgtgccatgcggaaggattgttcctcgggtcaaaaccggagctgattcaattattaaaacctttattaaatgccggaacgccggcacaaacagtaatcaaaacactatactatccggattgtatagatttcttagatcctgatgaaccgattcccggcaggtctgatcagagtgttaaattctcctcggcgtgggcgctcaatctttggccggaagaacctattgcagtaatgagacaatttttagaaaaagcgactgggacagaaaccaatttcttttttatcaattggggcggtgcgataagcagagttccaagcagtgaaacagccttctattggcgccgtccgttattttatacggaatggacggccagttggaaaaataaatcacaagaagcttcgaatcttgcatcagttgaaagagtgcgtcagctgatgaaaccatatgtaacaggttcttatgtgaatgttccggatcaaaatatcgagaacttcggaaaagcatattacggctcaaactttgcaaggcttcaaagaataaaggcgaaatacgatcccgaaaatgtattccgttttccgcaaagcatcccgccatcgtataaatagtttgatcgttgtgggaaacaaaataaaaaacacaccagaacattcaggtgtgtttttattgttgctataaaagttggttattcacttatattcccagtgcggattccaaacaatttcccacaagtgcccgtcggaatcttggaagtgaccggcgtatccgccccaaaaagtatcatgagcgggagcagttatcgtaacgtttgattcatgtgcgatgtctttgcggtcccagagggcaagtttcagtcccgtttgcaagtcgtccaaatctgtaccggctgttccttctgtattctgtaggcagacccaagccatcccgatagaagtgcagcgatttttctaaattatctgcgcctaaagtaattactgtaatccgcggcttcatagcaatgcaacctcccaagctaagctaatgataagaaacattttcattgaaaatattttgacatttcagtaaagaacctatatattcatatatgagcacataatcatataaggttatttttgtgtccgtgttagaatgcttcatagcagaaaagaaataataaatacagtgtattagataaggaggagatttttatgggtcacaatcacaatcacgctggcggatccaataagaaggttttattgatctcttttatcatgattacaggttatatgataatagaagcgataggcggatttttaaccaatagtttagcgcttttgtcagatgcaggccatatgctgagtgattcaatctcattaatggttgctctgattgcttttaaattggccgaaaaaaaggcaagtcatcataagacattcggctacaaacgatttgaaattcttgcagctgtgatcaacggtgttgcattaatactgatttccctttatatcatttatgaagcaatcaaacgtttctctcatccgccggagatagcaacaaccggcatgctgacgataagtatcatcgggttagctgtgaatatattggtcgcttggattatgctgaacggcggagatacaaagaataacctgaacattagaggagcttacttacatgtgataagtgacatgctcggatctgtaggtgccatactggctgcgatccttatcatcttcttcgggtggagctgggcagatccagtggccagtgtcattgtggctattcttgtgctgagaagcggttaccatgtgacgaaagactccattcacgtattaatggaaggaactccggaaaatatcgatgtcactgacatcattcatacaattgaagagacagaaggaattcaaagcattcatgatttgcacatatggtctatcacaagcggattgaatgctctttcctgccacgctgttgttaacgatcagctgaccatttctgaaagtgaaagtattttacgcaaaattgaacatgaacttggagatcaaggcattacacatgtaaccattcaaatggaaacggcagcgcataatcacgacaatacgattctttgtcaggcccaaactgagaatccgcgtgaccatcatcatcattaaaggaggagatagggactaactttgtctgctgacaattaagataaaaccggagggggattcatatgtacgacacgatagtaatcggagccggtcaggcaggaatctcagtaggatattatctaaggaagtcgaaacaaaagtttatcattttagataaaagtcatgaagtgggggaaagctggaaaaaccggtatgactcattggtcttatttacttctcgaatgtacagctctttgccgggaatgcagcttgaaggagacaagcatggactcccttcaaaaaatgaaattgctgcttatctgaaaaaatatgttgaaagatttgaaatcccgatccaattacggacagaagtaataagtgtccaaaaattaaacaactatttcttaattaaaacaaaccgggaagaatatcaaacgaagaatctggtggtggccgcaggtccttttcatacccctaacattccatcaatatcaaaggatgtagccggtcatattcgtcaattacattcttcacaatataaacattcaaaacaactggcgcctgggaatgtactggtagtcggcggcgggaatagcggggctcagatagctgttgagttatccaaagaaagagttacatatttggcttgcagtaaaaaaccggtttatttccctttatggattggaaaaagaagcatcttttggtggtttgataaattaggagttttacatgcaagtcatacatcaatattaggcaagttcattcaaaagaaaggcgacctcatatttgggtatgaattaaaacatgcaataagacagaagaagatcatcttaaaacaaagagtcatagccggaaagcaaaatgaagtcatttttaaagattcatcttcattagaagtaaacaatgttatttgggcaactggttttaagaatccgctttggtggatgaaaatagaaggtgttttggataaggaaggccgaattatacatcaccggggtgtttcagctgcggagggattgtactttattggtttgccttggcagcataggcgaggttcagcgctgcttcaaggtgtaggaaatgatgctgaatacattgtaaaacaaatgaacggcggatagactgaggagagcagtaacttacgtgtttactgctcttttttgtgttgaatacgtccatcagtgcaactattttagtccgcgcatattcagtttgaactaaatggattcacatggagcgcgtgcttcactcctcgttcagactctctaatttaattctttcaagtaaaagtcgaaatagctcaaataacaagaagttaaaaaactgcaaaccccgccgtatacgtatccgcccactatagagttcattaattacttgggaccatagaagaattgtcaatgccacttccgatagttgtaaccagccaaaaaaagaaaatggggagggtgtgcttaatttgcacaatcttttatgtagaagtggcccaaggagccatcctgcattttgcattcgaatgaacctgtcgtaaaaaattgagagcagacttaaatatctgctcaactcgctgttatttctcaatgttgaatcggtctttgatcttttcaggcagtttctcggccttaatagcttcagattctccggtataaccctcatagctcctcggaacgcgtacaatgtcaccttcttgataaggcttttcaacaaagaaagaaaccatctttttcttacctttctcgttatacccttctaaattgtaaacgtagttgctattatttttgtttttttccgcttttccgtgaatttgtacgtaataatcgctttccagcacggcgccttgatcagcgcagcctcctaatatgaaaaccgataggcagcctaatataataatgaaaatgctcatgtttttcattcttcatcactccttttatatttcttattctaatgaacactgcatatcgaataaatgcgaataccttacacttaccttacttttttgtaagaattcctgatataaaagataatgattcagttgcagaataacaaataatgggtaaatgcaatctcgtttggaaggagactgatatgatcattaaaatgactccattttttaatatgaaagaattcaataaaccaaacaaccatttgctgtttcaaggagaattgcacctgcatttgaaagcaatgtgtggaatataccgaggaacgatttgctgaaccttatgttaagaaaaatgaagatgatgatgtcagttacgttgaagaagaggggaaagcggtctttttttattacaactgcgccggccggattaagatacgttgcaaatgtaatagcgatttttgtctgaccattttaattgattggcagtcagtgaaaatagacatttgtaatgaatttatcgttgctcctcctaataagcggctttaactgccaagtttctgtttctcttcataccatttgcgaagctgatgaatatgagcttgatgatatctattatggtctgccatatgccatattccccattgaatggttgatgatttggtcctttataatcaatctcctgctgtgacatgtctgacacaatggatattaagcggctgtcattttcattaacggcagaatacagcgttcccacaagatgatccatgtgcgtttcaccttttaaatctaaaatcattaaccccacctcattagcacaatttttatatcagtttgccttattactcatatttgtcaagccatccggggaatgggccgctgtaagacgaagctatgaagcaggctctctttgcctgctttttttgtgtgtcggctttacatctgacatgttgcgttatctgaaactgtacctttttaaatgtcagacagtgttatatgatactctgcagatattcaagaatatgtacttggaggacattctcatgcgaaattttaatgttgctatccctacgccttttcatgaagatgaaagtttatatttagaaggatttgatgctattgtcgaacatttgaaaaacagcggtatccattcgttactcatatgcggcacgactggtgaacagcattcactcagcatagatgagcgtcttcagatcattgagtatgttaatcagcgaaaatttgaagatgttgaactgatgttcggtgtttcagccgtaagaaccagtgatgccgtcaaactgatgaaacacatcgagaaaaccaatattgattctgtactgattggttttcctccttatataagaccgacacagcagcaagccgtttattacgttgacgaacttctcagtcatacctctaaagaggctgtgctttataataaccccggccggaccggttttaatctgagtgagaaagcgcttaaagacttaataagccggcatcccgggataagggggctgaaagaaggaggagacgttctgcgtcataaacaaacagagttccctgatcactttattttgtttgcggcaggagacgttgaatttccgaagatgctgagtaacgggtgtaacggcctgtcaagcatggccggaaatgtctatcctgaagaaatcagagaaagcttcagcagcttatcagaaaataaaccgattaatctggatcgaataaacgatctgattgctgaagtgacaaatcatcatactgtcatgaatataaaaaatcactataagaagattgggattcaagcaggcagctgccggtcacccattatataagaaatgttccgtcgcggataagtgaaacatgtgatcagcgcgctttctgtacttggattaggcttaataagcaagttttataatactgtcattagcgggggcgtaagcatttgtttaactttacataagggaacccttatgatatggtgattattgttaatattgacaagaaagaggtgaaagcgatgataacgatttatggaattttgtatggtgaaaatgcaaaaattggaaacatcttggcggataaagggagcagtctgtccttttttaagccaaatcatcatacaaaaacagttatcggtgctttttctctatgtcaaataaacgataatccaatgacataatgtccttgtttatttgtgcatgatgttatttaagcgtaacaccgataattgtgtcggtgtttttttgtgcctgattttaaaaaaaggttagatgatcactcccttctatttactcaaacaaaccagagttttatggaaggatgagaaaacatgcaacaaaaaaacaagtatataagaattcaagagttcctgaaacaaaataagtttcctgattttagaatgaatcaaatcaaaaatgctgtgttcaaagggagaataaatcattttaatgaaataacggttcttcctaaatccttgagaaaattgttaatgaatgagtttggagagtcaattttaaatattgctgctttaaaagtgcagcattctgagcaagtaacaaaagtcttatttgaaatttcaggagacgaaaaaatagaaacggtcaatatgaaatataaagctggctgggagtcattttgtatatcctcgcagtgcggctgtcattttggctgtgcattttgtgcaacaggagatattggtttaaaacgcagcttaacatcagatgaaatgactgaccaaattttgtactttcacttaaaaggacattcaattgatagtatttcttttatgggaatgggagaagcattagcgaatgtacaagtttttgatgctttacatgtgcttacaaatccggagttgtttgctttaagccctcgtcggttatctatttcgaccataggtattattccgggcattaaaaaaatcactcaggattatccgcaggtcaacctgacgttttcattacattctccttttaatgaacagcgaagcaagttaatgccgataaatgaacgcttcccgttattggaggtaatggacacattagatgagcatatacgtgtgacctcaagaaaagtttatattgcttatattatgctgccgggagttaatgattctattgatcatgcgaatgaagtagtacgtcttttaagaagcagatataagagagggaacttgttccatgtaaacatcattagatataacccgactgttagttcacctatgagatttgaagaagtaaatgagaaacaagttgtaaacttctataaaaaattaaagtcagcaggaattaacgtgaccgtcagaagtcaatttggcattgatatagatgctgcttgcggacaattatatggaaattatcaaaaaaataagaaccgataaatcaggtgcagaactcggtttgacttcatattatttcatttgataacataaaatggttattgtgattgaaaaaaagatacccgtttttataaaaaaggagtcataacgttgctgaaaaggttttttcttgtttttcttacgctgatgatgtctatatttgctgtattcgcggcggctgaagagtctcccggcaatcgtgtcatttcttttgacgagcctatgattttattgatctcactcggaatcattttatgtttgttcattccgccattcgtcatgtccttttttagcagcttggttgtgagaatcatatccggagtctatcaatgttttatcgttctcacgtttgcgggcctcattccgattggatttctgattcccaatggctttttgacaattcttgctgccgttctggggactttggtcagttcagcgagtgttgcggtcaccttattcgttggcaggacagagaacacaaataagctttcgtaagcggttttgacaacaataacacgtcctgaaaacaccaagtgtcacagacccttggtgttttttaattccggcagaaaagaaggtataatgggcggggaagaggtgtcagccaatgaaaataaccagagagacattagaaaaacagcaaatttggatatatggtgtgactcttgtgatcggaggaatagcggggatcgccgggaaagattcaggacttcgctggggatggacgatatcactgtttatcgctgttctcatgtatgccatgtttgcccaaatcccattcttgaagctgagggaagccatgtcaaacctcaagtttatggcggccttactgatcggtaatttcttagctgtacctgtcgttgtatgggtgttaaccgccatttttcctcaatctcctcctatattatcaggggtttgtttggtattgcttacaccttgtattgattacgtcatcgtctttactcagctcggcaaaggaaatgagagattaatactggcttccacgccggttttgttcgccgttcagatggtattgcttccgttatacctgtggctgtttatcgggaaagaagtgataggagctgttcatgcgggaccgtttctggaagcattcttattgttaatagcggtgccgctgctggcggcggtgatgactcaattatgggctgataagaaaccggcgggagaaaaggtgttggaatggacggcgtggctgcctgttccttttatggctctggttttattggcggtcgtcgccacacaaatcggcaaagtcatcaatgatgctgacatcattatacgtgtgattccgatctatctgctattcctgctcattatgccgtttgtctcccgttttatcgcatatgcgttccgtctggatacaggtgaaggaagagcattgatcttcagcacgggcacaaggaattctctcgcagtccttccgttagcgctggctttgccggatgcttgggcctcattagccgctgctgttatcgtcacacagacgattgttgagctgatcggtgaattggtttatatcaaagcggtgcccggatggctgctgaaataaaaaataatctgggctgaaaaaaacataccaatagatattggtatgttttttatgagaattataaagttgcaatatcaataacgaaacggtagcggacatcgctttggagaacccgttcgtacgcttcgtcgacttgatcggccggtatcacttcaattttaggagcaatgccgtgctcggcggcgaaatcaagcatctcctgagtctgcggaataccgccgacgagtgaacccgcaatgctgcggcggcccgtgattaaggagaacacactgtatgagtccggcttagcgggcgctcccacatttaccaatgtaccgtcaatgcgaagcagggataagtaggcatctacgtcaaggttcgcggatactgtatttaaaataagatcaaatcgtccggccagctcagtaaatgtatccggatcgcttgtcgcaaagtaatgatcggctccaaattcaagcgcttcgtcttttttgttcattgagcggctgaggacggtgacctctgcgcctaaagcgtgcgcgaattgaacggctaaatgtccgagcccgcccattccgacaatcgccacttttttgccgggaccggcattccagtgtttcagcggagaataggtggtaatgcccgcgcacaatagcggactggcagcatccaaatccagctgatcgggaatacggacaacgaatctgtcagtgacaactattttctggctgtagcctccgtacgtagggtttccgtcgtagtccaggttattataggtctgaacaacgccttttgtgcaatattgttcgtctccgttcaggcagtattcacattccccgcaggagtctacaaaacagccgacacccacacggtcgccggcggcaaatgtggtgacttcttcacccacggcttccacaactccggcaatttcgtgcccgggaaccatcggaaagattccgccgccccattcatcgaatgcgctgtggatgtctgagtgacaaatcccgctgtacttaatatcaatcaggatatcgtgcggccgtaatgctcttctctcaatcgtcgtccgctcaaatttagctttggcatgcggagcgcttaatacacgagtcggatgattattgcacatggttatcttcctttccaagataaagtgatgaatcctctgttcggttttactttaaatgttaaagcggactttaagtcaaggggtttggtttatttttttatgaaatgatattctataatggcacgcttatgaaaggtatgaaggatgggtggtaagaatatgaagattgcgcaggctgcaaagcaggttgagttatcagccgcgacgcttaggtattatgaaagtataggactgattcctccggtaaaacgcgatgaaagcggcatccgcgattatgacgaagatgatgtgaattggattcaatttataaaatgcatgagaagtgccgggctgtcgattgaggcgctgattgaatataccgctttatttattgaaggagccgatcatacgatcgaaccccgaaaaaacatccttataaatgaaaggaaaaggctgacggagaaacagagggaaattgatgaaaccataaaacgattaaacaggaagattgaggattacgaagatatcctggaaaatgaagcgaaacttaaaaacagattgaaagctgaatgtatttctgaatgaagagaaggtgtcccgggcgccgggccgcatgaaatgtaccaagggaaacgagccttggttttttttattttctaaagagaggaaacaaaacagctttttctatcttatcaatcattacttatccttttttcagcttgacttttttactgcagacttttaaagtgtgaaatgttgcttagactgtgattagcgactttaatgctgaaaagaggtggtttacccagatgaacaatcataagaatccttgggcgttattgcctttagtcttattcgtagggctttttgtcggctctggtctggtgaccggagatttttataaattgccgatcttgattgccgcgatcattgcgtcagcttttgcgctgttatttaaccggaagaaatcgctcaatcaaaaaatagaatggttcgcttccggtgcgggacatcctgatattatcattatggttatgatttttatattggcaggtgcctttgcttcagcggctgaggcgatgggagcggtgcattcaactgtcaatcttgctttgagcattattccgcagcagtttttgctgccggggctgtttatcattgcttgtttcatttctatatcgatgggaacatcaatgggcacgattgcggcggttgcgccgatcagcgccggtttgagcggagagcttggcatctccagcgcgataccgattgcggctgtggtcggcggagctatgttcggagataatctttcttttatttcagatacgaccattgcggcagtccggacgcaaaaaacacaaatgagggataaattcaaaacgaactttctgattgttttgcccgctgccattgtgactgttattatcttattttttattccggcaggccacgccctccatacggatgctgcatcttacagctggattaaggtgcttccttatgtcgccgtgttagtttttgcgttaatcggtattaatgtgatggctgtcatattcggcggattggttttgacgggaatcatcggattggcgggcgggagcctgacgtttgattcttattttaaagcgattacggatggagttgccggaatgagcgaccttatcatcctgtccatgctgatcggcggaatggtcggtgtgatgaaacaaaacggcgggatcgactttttactggagttcatcacgaaacgaatccgttccaaaaaaggcgccgaagccggcattgccggattggtcagcgtgacgaatctggctgcggccaataatacgatctcgattatcgcagccgggccgattgcaaagaatattgctgataaattcaacatcgacaacagaaaatcggcaagtattctggatatcttttcgtgtatgatacaaggattgattccttacggcgcgcagctgttatcagccgggaaattcgggaatatttcacccgtcagcatcctgccatactctttctatcccgttttaatcggaatctgcggcatcgccgccattatatttggactgccgaaattcccaagaaatacgaaataaaagataaaaaaaggcgccgttcggcgccttttttctttcatgacagccaagcatttctcaaaagctgtacgccttgtgtgatctgatccgtatcgagatgggcgaaacctaactttatgatcggcggttcgggctttccggcaacgaaatagacagcggtagggtatactttcactccgtactgaaaggcgcgttcgattaatgtttcttctgtatagttcaggtgaactcttactaatatatacaatcccgactgctcgccgatgatcgtcacctgatcgccgaactgctgcttgatatgtgaagtcaagtgctgcatcttacgcttgtagacagtgcgcatgcgcttaatatggcgggtccattcaccggccttcatcaattcagccatggtcagctggttaagcgaagaagcggtgctttcgaaatgaataaaccgttttttataccggtgcaaaaggcgctgcggcaaaaccatatagcttatgcggatgcccggtagaaaggattttgagaaattccctaaataaatcacccggtctgattgaatggaagcaagagcgggaaacggctgctgtgtataacggaattcactgtcataatcatcttcaagaatataaccctctctatgattcacccaattgatcagtgtttggcgctgctgaatggacatgcttacgccgtaagggctgtgatgggatggggtcacatagattaatttttctttcattgcatgcaattgagaaaaatcagctccgttttcatagacaggcatcgtttccagagatagcccgtgaaattgaaatgccgctctggcaccgtcaaacccagggtcttcaacgataattccggaaaaatcctctttcagaatctggctgagatatatcagcatctgctgggtgctgctgccgatgataaccgaatccgcatctgttttcactccgcgtgattccaagagataagcggcaatttgttcacgcaggtttctctcgccgaacggttcaccgtacagaaagcttttctctgatgccaaaacttgattgtataattttctccatgttttcagaggaaaatgcttttgatcgacggctccggcgcgaaaatcaatcagggccggctgagttgattcggttttctcagcgtaaacaacatcatgttcttgttgaaataaagagggttctatttcattagcaaaatatcctttgcgtgtttctccgcgaatgtatccctccgctaaaagcagatcataggccatcagcgttgtattgcggcttacccgcagggaatccgccagctcgcgaatggaaggcagccgctcatctgcctgaatatttccttgctcaatcaatgttttaaattgctcgtaaatttgtttgtatttcggggtgccgcttctgaaagcgaaaatcaaatttttcatcagatgttctcctctgacatgtgtatttatttgaaactgtatctttttaaatgtcagttgatattttattatagcggaaagcgctttatcaatccatgttcagagaggagagttttgtatgtatattccggctccatttcagctgagtgaagctgaagcgtgcgatgtaatcaaagagtatggtttcgcagcattgttttcaacggcggggggcatgccgtatgcaacccacctgccattgatgatgagtaagaataacgaatgcttatacggtcattttgcattgccgaatccccaatggaaagagattgatggccaaaacgtattagccgtttttcaggggcctcattgttatatctcgcctaaatggtatgagacgaatcaggctgttcccacatggaattatgtggcggttcatgtttacggagaggcggagcttttggatgaggaagaaaccgtgcagtcgatgagtgatctcgtattgaaatacgaaagccccgacagcccgtacaaattagaggatgtcgatgcgaaattgctggcaggcatgaacaaaggggtaaaaggttttaaaatcaaaatcagcaaaatagagggacaggcaaagctgagtcaaaatcattcagccgcaagacaagggctggtcgtacaacagctcaaacagattcctcatacaaacgaacagctcatttccggcttgatggaagaaaacatcaaacgaatcaccgcaaaaaactgacaagcatgttaaaaacataccggcagcatgcggtatgtttttttctgattatgaagcttttctcaggatgaataacgactcgaacagcacataaatcaacggcgccattaaaatgaagaaagaatgaaaaatagcatacggtatgagtaagtaaacgataagtttcaatagaatggaagacgttttattcaatgtccagcggtttttcaagatatcagtcatacaggctgaaacaaggccgaccgtcaaatatccggctgctatgtaaagataaataaaaaggtaaaacgggtaagaagacaacgggggtgtgtcttcctgtgtcatttttaaacccacataaaagaccaataaaaagcaaacggacgaaacgagagctaacaaaaggtgtttatataaatacttcttcatgtgtttcacctgcctatggacaattatttctaaacatattatgacatggttttaccgctgctgaaagaatcggcagcgggcatgcgcccgtctatatgagcggggcgtaaagaatcaatatcatcttttcatgaatccggatgttttgttcggatggatgtaaagaagaatacaccccaaaaaaagctgtcagcttggtcctgacggcttatttttggtgaaaggcttatttctccgtggtgaaataaagcaatgctatgaccggaaaagcgattccaatccataatgtgatactccacccgcctgaggcgtatgcccatcctccgattgatgatcctatagcgccgcccagaaagaagattgccataaataatccgtttaatcggctgcggaattcaggtgccaacgaaaaaatggcacgctgactgagtacgagattggcagatacccccatatccaacaggatagctgcggccaccagaactgctattccgacgggagagctgctctgaatcatgagcgggagtaataaagaaacgatgacaacaccgagagcgattccggtggcaagccgggttaagccgcgatcagccagacggccgcctatcggtgcagccgctgcacccgcaatgcccgctaatgcgtacagcgcgattgccttttgagaaaaatgaaaagcaggaccggacaatagtaaaggtacagtcgtccagaataagctgaaagctccaaatacaaacgcatgataaatggcacggcggcgtaagaccggagtcgtgcgcagcagcttccacattgaaccgagtaagacggtgtagcttgtgtttgctgttggttttctggcaggaagcacttttgataagacgattgccaggacaacacttaacgcggcggataaagcaaatatggcattccacccccatatatcagcgaccagactggatatcggacgggaaagcataataccgagaagcaggccgctcatcacattgccgacaacccggccgcgtgcggcatctggtgcaaggtatgatgcgaacggaactagcacttgggccgcgatggatcccagtccgatgaaaaacgcagcggctaaaaacagtgttccatgcttcacacatgctgtcagagttagagcggctgcgcttagtaggagcgataccacgacaagttttctgttttcgataatatctcccaaagggacgagaaacagtaggccggcaacgtatccgatttgagtcagcgtgacaatcaatccggcactgcttggagaaagcccgattgccgcactaatgaatcctgccaagggctgtgcataataaagattagcgacaatgataccgcatgccgttgcgagaagaagggttaaaccagttgaaatcccctgatccgctgtttgtttattttctttagccatatgaatgaactcctttttaatgattttatgaggtttgataaatattttgctgattcatctcctttacgcagaggcttttggagtctgcatttcatcaagacttccctcaagttattttataaactaaacgttcagttttgtttataagtgaataatatactaaacgttcagttttgtaaatgggtttctgttttcttttttatacaggttaagtatactgaacgtatcgtttataattcgggaaggaatgattcatgtgcagagtaaacgaggacggccgcgtgatgaaggaacacataaggcgattctttctgctgcctatgacctattgttggaaaatggctttgacgcggtgacagtcgataaaattgcagagcgtgccaaagtgagtaaggcaacgatttataaatggtggtcaaacaaggctgccgttatcatggacagctttctttcgaccgctacggacagactgcctgtgcccgatacaggatcaacagtgcaagatatattgacccacgccgcgaatttagcaaggtttttgacgagccgggaaggaaccgttattaaggaattaatcggtgcgggacagctggatgcaaaattggcggaagaatatcgcacgcgatttttccagccccgccgcctccaagcgaaaggccttctggaaaagggaattcagaaaggtgaattaagagagaatcttgatattgacgtaagcatcgatctcatttacggaccgattttctatcgcctgttgatcacaggtgatgaggtgaatgattcctatgtgcatgatcttgtgatgagtgcgtttaagggagttcaagctacgtgaataaccgccgctcgaatcgggtgaaaagtatttgtgcctatggggcagaaaataatgaaaaggcagaacaaattgttctgccttcttcgctctatttgcgaaccgcccggcggccgccacgcacgtaatcaccgccgcaagccccaataacagcccgaagaaaggctggagaagctgcagagctgattcgcgggagtttcgttgcctgggcgctgtaaaggcagttctcagtttgacatactgaagctgagccagaggtgctgtctcagcaggaaaacatttataggacgggcaggcggagcgccgtatcaatattttgcaaattaaaccggacttgttcatctgtgttccacggatgataccagcctttttccatcatatagcgtgagatttgctcatgcatgtcgatggcttcttctaagtgacgggtgaggatcgctttcacttcaggcgttccggcttccgtcgccgccatcgcatagtttctgactccgctttttgccgaattcaataaatccatagcgacaatttggtctgtcagtgcatccatccccgtcaggtattcaataatcggattcattcgtcattcatctcctattcgtgctttgcatcagataaaatcgaggcaaattcctgcaattgccttgttgatgtatccgcatcctgctgcatgatttctttcagctgcggatcggatacgagcgctttcatggttttggatttcgtcaggcaaagtgacttaaaagaagccatctcctgaatttcgagtaattcatgtaaggcgctggccatttctgtagcctccgttctctaaggtttgagtacaactttaatacaatcatctgttttcgtgtcaaacatctcatagccgtgcttcgcttcactgagcggaatgacatggcttacaacatcacccggatcaattttgccggttgacaccagttcaaacatatacggcatataatggataaccggagcttgtcctgatcggatattgacgttccgctgcatgatatcgccaaggggaaatccgttgtatctgccgccgtacacacccgtaatctggatcgttccgccttttcgcaccgcttgggacgcgatgaccaatgcgctcatggcccgccttgaagttttaatccgctggcgaggaactcaagatctgtcatttttccgtccatgccgacggcgtcaatgacaacgtcggcgccgcctttggtgatttccttcaggtagctgcccgtattttcgtggtcttcgaagttcacgatttccactttattcgtccgtttcgcatgctggagacggtagttgacatagtctacggctatgacgcgtttcgcaccctttaaccagcagaatttttgagcgaaaaggcccacgggcccgcagccgagaacgatgaccgtatcgcctgcttttacgccggcattgtcaacgctccaaaaaccggttgtcatcgcatcggcaataacactcaatttctcatccggttcttcgcatgtttcggggactttaaaatgggtaaagttcgcaaaagggacgcgcaaatattcggcctggccgcccggatagccgccggtactccctgaatagccgaaataagcgcccatatcgccgttttcatttgattgatcacattggctttccaggtgatttttacaataagtgcattctccgcaggcgatattaaaaggaataatgacgcggtcgccttttttgactttcgtcacgccgggaccggtttcttccacaatgcccatcggttcatgcccgataatatagtcttcctgcaagttcggaatgagtccgtggattaaatgtaaatctgatccgcaaattgccgtacttgtgacttttataatcatgtcatcgtgtttttcaatcttcggatcaggcacgtctttgacgacgacgtttttcactccttgatacgttacggccttcatgctgtaatacctccagtgttagtgttcatcaggtgtgcggtcaaacatcccttttctgttcgtttcaacgggaaacagattcatgtttccgaccatgagggtatttttcgcagagagctggtccagtttatactgttcgctcagatcatgcgggtgaaaccactttttgctgaccatcaagtctgtaatttcctgatgcatcgcgattccttgcatgagctgtttgcgcagcaaagctcttacatctggcgaggcggtttctgttaaagcaacggcggtatttctgacgccttcttttgcgcgtatgagaaaatccattgcgaatgtcatatctgcgagttcagggacgtgtaatgaattgattggatctaaatggtcatggttcaatgatgcttaccttcctttcaattgatgatcgaagtcggccggttttgaggaacaggagcctgaaacgttgcccgttcataaaccgcctgcagatcagcaaggttttgcgaggcttgctgaacgtctttttccattaacgttttcagatcctgatcaaacacaagcccttgcatgagcttggatttcgctacacaaagcgtcttgaagttaatgatttcatgtaagtccagcgactcgtgagccgctaattcacgcttttccataatcgttttttaaacctcctcttctcaattacataattaatttcccctgagaaaagagctctagtcttacaaattttgtttataaaaaaagagagaagaaatttgacggtacattaaaaaagaggaagcacaatcgcttcctcttgttcacatggaatggctgtcggtgtcctgaacgtttttctgatgcgcgggcggttttgccgcgcgggagacagaccgctgaaacccgggaaaggtcataaaaaagatatgaacaaaagcagcccgcgaacaatcccgcaggctgttttttctttcacccgtcaagcaggacagaaggggaaggtgagaagcaggcgattatggtatgatgacaaatagaataaaacatcgtgaggccggtcggctaaaaggaagtggacagagattgtttggtacaaaacatcaagaagactatgtctcccgtgacagacgctcattgcatatgcttgcgcttcgggtgcccggtctggcgtttatttttatggtatatgccgcatcagtctctttgcagtacatttatgaaagctggacggttttattgctgctgttattcacgatattgatcgtcatttttgctgtgctgcactggcattcctatcgctgggtcaagaaaaaaacgtttctttatttcatcatacagggatttatcatatatacatcggctaacttgatgaccggcggctatatcgcggcggtcatcggtctctatgcctttttaatcgggcagattatcggaatggcggataagggcaaaacgccgctcatactctatcttttcattttaatgtccatagcagccctgcaccaggagcatccgcatcatctgcttcgtttcatcgttatcgccgctcccatcatgatcgtgattatcacatatgcggcaacatttttcgcgcaagttgatgaaaaaatcaaaacacagatgacgcttgaaaaattagagctcgctcaccggcaagtgaaacagctgacgcttcaaaacgaaaggcagcggatggcgagagacttgcacgatacacttgcacaagggctggtcagcttgcatatgcagcttgaagcggtgcatgttcatctttcaaagggtaacactgacagagcgaaagacatcatcagccagtcaatggacagagtgaagggcacattggctgatgcgcgctcggccattgacaaccttcgcagcaaatcagaagagatcgggttcttaaaagaaagcatcactgaacaaatcaaccattttacagaagcctccgggctgtcttgttttttagattacagcgtgcatcatgtgcttgacgttcatacggcggagaattgccattacatgatcggagaaggcctgactaacgccgccaagcatgcagaagcaaagaatgtctgggtgtccgttcaggaagaagagggacagatccgcataaccgtcaaagatgacgggaaaggctttgatgccggaacagaaatgagaaaaagcggacattacgggctgctggggatacaagaacgcgtcaatatgatgaacggcactttccgtataacaagcgccagatcagcgggaactcaaattgagatcatcataccaattcaaggagaagcggaacatgtataaagtgttaatagcagatgaccatcttgtcgtcagagaaggtctgaagcttttgatagaaacaaatgaccattacaccataacgggagaggcggaaaacgggaaaaccgccgtccgcctcgcagcggaactaaagcccgatgtcattctcatggatctgtacatgccggaaatgagcgggctggaagccattaaacagataaaagagcattctgatgtgccgattattattttgacgacctataatgaagatcatctgatgatagaaggcatcgaatcaggcgcgaacggttatctgctgaaggacacaagctcagaaaccttatttcatacgatggatgcggcggtcaggggagaagtgcttctgcagccggacatcttgcggcgtttccgggaaaagaaaatggaacgggcaaatgccaatgaaacacagctgacggacaaggaaatcatagttctgcaagccgttgcgaaaggacataaaagcaaagcgatcgccttcgatttaggaatctcagagcggacggtaaaagcgagattaacatcgatttataacaaattaggcgctgattcgcggacggaagccgtcaccattgctatgcaaaaaggcattctgaaactgaatatataatgaaaaactgcccaaacgtacatgcccctatgtacgttttttttatgtgaatgtgaactacaattaggcagaaagtaatgattggagaggagtattcgatgtctggttttttatataaattagggggatggtctgcccgcaaccgattcaaaatgatcagtgcgtggctcgtgatactgatcgcttcgattgtgatcgccatctcgttaaaacctgctttttctgaggatatgtcaattcccgacacaccttctgaaaaggcgatggatgtgattcaaaaagaattttcaaaggggcccgataaaggaagcatacgggttattttcggagctgaagacaggaagaaattgacgtcaaaaccggaaaaacaagcgattgaagagacattaaagaagatcaaaacagatcattcggtcgcttcgattgcaaatccttttgaaacaggaaccatttctaaagacgggtcagtggcatatgccgatattacgtacaaaaaagcggcggatgacattacggatgcgtctgtttcacatattaaacacagtctgtccgccgccggagacaagggcctgcagacggagctcagcggcgatgtgccgggggccggtgttgaagccggcggtgtatctgaaattgtcggcgttgtgctggctttcgtcgttctggccattacgtttggttcattagtcatagcggggctgccgattgtcacggccctgatcgggttaggtgtaagcgtcgcgctgacgttaattgggacacagatctttacgatagcctcggtcagtctctcattatcaggaatgatcggcctggccgtcgggattgattatgcgctgtttatctttacgaagcatcgtcagtttttgggcgaaggtgtacaaaaaaatgaatcgatcgctaaagctgcgggaacggctggcagcgccgtcgtttttgcgggactgaccgtgatcgtcgcgctttgcggattgaccgttgtcggcattccgttcatgtctgcgatgggattgactgcggcactcagtgtgctgatggctgtattggcatcagtaacgctggttcctgcggtgttgtcaatcgcaggaaaacggatgattccgaaatcaaacaagaagaaagaaaaggaaagcgccgacacgaatgcctggggacgcttcgttacaaagaagcctattctgttaagcattttcagcattattcttttagctgtcatcagtctgccggccatgcatttagaactggggctgcctgatgcgggaatgaaagcgaaagacagcccggaccgccgcgcctatgatctgttgtctaaaggattcggcgaaggctttaacggcaagctgacaattgttgccgatgcaaaaggagtcaaggggaataaaagtgaagcatttcaagacgccgtgaaagaaataaaggacttgcacaatgtggcgagcgtcacacctgccatgccgaatcaaaaaggggattatgccatcattacggcagtgcctgaaaccgggccgaatgataaggcaacgaaagagttagtgcaggatatacggaaacgatcagacaaaaacggcatccgcctgctcgtcaccgggtcaacagcggtgaatattgatatttcagaccggttaaacgatgcgattccgaaattcgccattcttattgtcgggtttgcgtttgtattgctgaccgttgttttccgctcgcttctcgtgccgcttgccgccgtcgtcggctttttgctgacgatgaccgctacactcgggttatcggtattcgttctgcaggatgggaatttcaccggcttgctcagcattccggaaaaaggtccgattctcgccttcctgcctattttagccatcggtattcttttcgggctggcgatggactatcaagtattccttgtcagcagaatgagagaagaatatgtcaaaacaaaaaatccggtacaagccatccatgccggattgaaacatagcggacctgtcgtaacagcggcgggactgatcatgattttcgtctttgcgggattcatcttcgcgggggactctacgatcaaatccatggggttggcaatgaccttcggtgttcttttcgatgcgttcattgtaagaatgaccatcattccgagtgtcatgaagctgatgggacatgcggcctggtacttgccgaagtggctggataaaatcattccgaacgtggatatcgaaggccataagctgacacaaggcaaaacaccggagaaaccggaagaataaaatgaaaaagcagatcgttatgatctgctttttttatgtgctgaccgcattcatgaacagagaaaaaagctttttcatgtcttcatgtttttttgtcagcatttcgggatgccattgcacgccgacgacaaataattcacccgttcgttcaatcgcttcaatggccccgtctttcgcataagccgcggctttaaatgaaggcgccgtctcttttatgatctggtgatggaatgaattcacccgcgctgaatcgccaaacaaggtatggagacgtgtccctttttcaaaagaaacatgatgggtttttaacggcggatctttttcttggtcatgcttaatgtcagcaaacgaagcgtgtgccaggtcttgatataaagttcccccgtaagtaacgtttaacatatgcatcccccggcagatggccagtatcggcttttctaaagcaaccgccgtgagaatcagctccttttcgtaggcgtcccgatcaggaaaggtctttcttaaagcctgtaaaggttcttcgccgtaaaacagcgggtctatatcctggccgccggacagaatgatgccgtcaacatgagagacctgttcctttaaaagcgccgtctcttgaatcaccggcaatataaacggcacaccgccggcctcagaaacagactgaatataatcattattgacatatgcccgattataacccgggaaagggccggattgatcagccataatgtttcccgtaattccgatgcgtttggccattctgcgttcacctgaacctttctttctgaaccttctcgtatgaatctgaacgtaggttgtacaaatcagtttgaaattattcttcataatacgtgaactttccaaaacaaaacccgtgacaatcacgggtttttacattcatttcaacttcttgatttcttccgtcagctctttgaacttttgatcaagctcacgatattgtttatcagccggagtcatgaagctgagttttccgaggacttcctgccgttcggtttcaaactttaatcgcagttcttcagcatcatccctgacggagggagattctttccattgttttcggacgctgccgtttgagatatcaagccggatgtccgtcgtcttttcgacaaagtaacgatcatgcgatacgatgatgagcgttccgtcgtatcgggccaaagtgtcttcaagctgctcgcgtgacggcagatcaaggtggtttgtcggctcatccagaatcagcacatctttctcccccagaataaacgccatcagcttgcatttgacccgctctcccatgctcatcttgccgatgggttccgtccattgcgctgcggtaaatcctaaatgcttcatgagggattgaacatttccccttgcttcgaacgtttctttgtaaaaaagctgttcggggttttatcaagcggaaggtcgaatacttcctgggttaaatagccgacgtttgcagacggagaaatccatatgccgccctgcgctttttcctgaccgaggatgaccttcaataatgttgttttcccgctgccgttcgggcctgtaatcgcgatcttttcaccgtgcatcacagtgaaattcacgtttttaaaaagcgttcggccttcatatgactttgtgacatcacttacttctaaaaaacgctttcccgcttttttgcggtgctcaatggaaaaacggacttcatactccgcttcaaccggttctgctttcgctttttcaagctctttttcaagacgcttctgctttgatttaatctgggcgtccgtgcgttttgcttttacgcggtgatattctttaaagccttctattttcgttgattgggcgtgggctttttttgaccaggcgctcagctcgttcatttgagcttcaatccgtctgatcatatgctgctgattctcatattcccgctgctgtgtcagccttctctgtttgcggacctccatatagcttgaataattccctttatgttcaatgagtttctttccttcgatggcccagatttttgtcgccgccgcatctataaaagcacgatcatgtgaaacgaaaataatggtgcctttgtaattcttgatctgattaagcagtatttctaaactgtgctgatcgaggtggttcgtcggctcatctaataacaaaaggccgcttgaggaggagaaacctttggcaagacgggctttcaatttttctccgccgcttaattgcgaaaaggcgcgtgcgggcacgttccacttttctaacaaggctgcctccgcaggctccggatggccggaatcataagcttccgtttcttgttccaccatatatatgttcacatcttgcatcatctggatctgtccttgtgacggcgcttttttattgcagatcaattgcagcaataaagatttgccggcgccgtttttaccgataacaccgatgatgtcgccttgctgaacactcgcgctgatctgttcaaaaaggggaacgctgttgatttcgtaactgatgccgcttatttttaacatttctttcatatgtcaatccctcgctttaaagggaggacaaaaaaatcctcccaattgatttggaaggattagccgtacctgtgcgtgatcaaataagctatttttacatagctttctcgtatcgtatagaaaatgggcagactaatcctattttttctgatttgaaatatttgatttcaaacggtcaaaataagattagttaatcattgtccacccatcatcccttcgtatttgttacgaacagtgtagcacacacttatctgtaaaagcaaagggtataagcctttttattccagatcggaggcttcccactcttcttctaaaacggcataataatattcatcccaccattcattatcatgggggatgcattttttaaacaagccttcccgcctcatcccgatcttttccatcacccggtgcgaagccatgttttccggctgacatgtcgcaatgatccggtgtaatttcatcttgttaaacccgaatgccagcacggcgcgcgccgcctctgaagcatatcctttgccctggtattccgggtgaaacacccagccgatttcatacgtatgatcgccaaaatactgaaaaaaaacaatgtggccaatgaccgttttctcatccttcaataaaacgggaaacttcccggcatgttcaccgctgttttcagtaacgaatttcctggcatcttcttcggtaaagacaccctctggtatatatttcatgacactcggattcgaggtgtacgcatagacatcctgccaatcttccggttcaaatgtccgaatgacgagcctttcagttttgatattcatttttttatgttcctccatcaaaaaaggtttcatttactacttcgattgaaagatgtaaaaaacctttgagcggggaagagccgaataaaaaaagcctgcagctatacactgcaggcggttatttttcatttgcggcggcgggcaggtttgtaaacccgaattgccctccgacagcttcttttacttcatgaataacgataaatgatttcggatcaattttttgaacatgttttttgattttcagcaattcgttctttttaatgacaacatagataatgcgcttgtctttgctgccgtaatacccgtatccgtaaaaaatcgtcgccgcgttgccgtactcggaggtgatggctttggcgatttcttcgtattggtcagacataatggtgagggcttttttattatggaaaccctcaatgacaatatcgacgattttggcgcacagataaacgaatataaacgtatacagcatatgattgattccgatcgctaaaacggatgcgaaaatgatgacacaatccatataaaacatgcttttggagatgttaaagccctttgtgtaattcaataaatacgccaaaagcgtggtcccgccggtagatccgtcagcgataaagatcaatgccagccccgctcccatcagcagagcgccgaatacaatcccgagcaccatgtcgtgcacgccgaacggaataaagctgacgatgctgagaaaaacagaagtcattcccgtaccgagtatcgtgtataaaatcgtttttttcgttaaaaatttataagccagcccgataaaaatcaaatttacaaccagagtcgtaatacttgcaggtatatggaaaagataatataaaacgagagcgattcccacggtgctgccgtcccctaaatgattcgggatgacgaaaaattccacggacgccgcgataagaaaggctccggccataatcatcagtatatccttgcaaatgttcttcatgtgcaaacctcctccgcagtcaaaaatatatataaaacaaaaacgcctcaaaaattatccagcagaactaaataatttttaagacgaatcattcacaatctcgtttgttcattcagtaaagaatgatcagcttcaatatcgaagattatatagacaccttcacatcttgtcaatgccgtgaaaattgattttctgcagtgtatatgaggtttaaaccaagttaaaacgaggaattatatcagaagagttttcatttccgctctatcaataagagaaatgtaatgagagacaacgaagaagggatgatgacattggaacgaatttttatcagtccggccaaatacgtgcagggaaaaaacgccattgaaacgatcggcggacatctggagggcgttggtgaaaaagccgtcgtcatcgcggacaaaaccgtatgggatatcgcgggccacaaggtgacggctgaattaaagaaaagcaatatctcttctgaagaggcggttttcaacggcgaagcctcccaggaagaaatgaaaagaattgccggcatcgcagaaaaagcaggggcgactattgtcatcggagtcggcggcggtaaaacgcttgatacggccaaagccgtatcagatgaaataaacggctacaccgttatcgtgccgacggccgcttcaacggatgctccgacaagcgggctgtctgtcgtgtattctgaacaaggcgcgttcgaaaactatcgtttttatcataagaatcctgacttggttctggtcgatacgaaaatcgtcgcggaagctccgccgcgctttttagcatcagggattgccgatgcgatggcgacgtggatagaggcgcgcagtgtcatcgccaatggcggtaaaacgatggcaggcggaattccgacaatcgccggagaggctatcgcggaaaaatgtgaagcggtattattcaaatacggccgtctcgcttatgagtctgtgaaagcgaaagccgttacgcccgcattggaagcggtggttgaagccaatacacttctgagcggactgggatttgaaagcggcggcttagctgcggcacatgccattcataacggatttaccgcgcttgaaggtgaaatccatcacttgacccatggtgaaaaagtggcattcggcacgctcgttcaattggcgctggaaaaacgttcgcttgaggaaattgagcggtatatcgcgttttatatcagcttggggctgcctgtcacacttgaagacatcaaaatgaaagacgcatctaaagaggacattatgaaagtggcagaagccgcgacgattgaagaagaaacgattcatgccgcttttgacgtgacggctgacgacgtggcggacgccattatagcggctgatcaatacgcaaaagcatttaaagaaaaacacgcgtaaaaccttttaccgcgtgacccggaaccaagggctgttacagcccttggttttttttatgccctttgaaaacttttaaaaataaagaaaaaattatgatacaatatacaaatgttttgagagattgacaaaggaaaggtgggaacgatatgctgcataatccgaccggtaaggagcggcttgcgctggcttttcttctcggaatgcttgcgatactggggccgctcaatatagatatgtatctgccgagtttccctgaaatcgccgaagatttaagcgcccgcgcttcgcttgtccagctcagtttaaccgcttgtctgatcggactgacaatcggacaggttgttgtcggcccgttaagtgacgcgaagggaagaagaaaaccgttattgctatgtatttttttatttgctttgttttctctgttttgcgcgcttgcaccgaacatttcaacactggtgattgcccgttttcttcaaggattcaccgcttcggcgggactcgttttatcccgtgcaatcgtcagagatgtgtttacgggaagagaactttctaaatttttctcgctgctgatggtcattaccgccgtcgcgccgatggtggcgccgatgacgggaggcgcgattttattgcttccgtttgcatcatggcatacgatttttctgtttttaacctttatcgggtttttgcttgttctcatcattgcgctcaagctgacagaaaccctgccgccggaaaagcggattccgagctccatcggaaattccgtgcggacaatgggaagcctgctgaaggatcggtcatttatcggctatgcgctgacggtcggttttattcacggcgggagctttgcgtatgtctccggaacgcctttcgtgtatcaggatatttacggagtatcgcctcaggtattcagtgttttattcggcataaacggtctggcgatcattaccggaagctttatcatcggccgtttcggcgggatcattcacgaaaaaagcctgctgaaaatcggcgtgattacagcgatgacggcgactgccgttctgctcgtcatgacgatcattcacggaccgctggcggcactggtgatttccatttttatttatatgattacgatcggcatgacgctgacaagcacctttacattggcgatggaaaagcagggacaccgcgcgggaagcgcaagcgcactgctcggcatgcttccgcttcttctcggttccatcgtgtcgccgcttgtggggatgaatgaagcgacggccgtgccgatgggggcaattatgttcacgacatccgttatcggttccatcgctttttttgccttaacaacaaaaccggagaaagcaaaaaaggagtgaaatgattcactcctttttttgatgcccgctattcatatttcttcagcacgatcgccgaattatgtccgccaaagccgaatgagttggaaaggccgatcgttaacgattgatggcggggcccgtctgacacatagtccaaatcacatgccgaatcagggtgctgcagattgatcgtcggcgggatgatgccgtgtctcaggctttctgtcagagcgatggcttcaacgccgcctgccgcgccaagcatgtggccgagcattgatttgttggccgtaaccggaatgtcatacgcaagctccccgaataatgttttgattgccaatgtttcagaaagatctccggcttttgtgcttgtcgcgtgggcgcttacgacatcaatgtcttccgctgaaacgttcgcctttttcaaagcatttttcatcgccaggtatgcgcccgtcccttccggatgggaggccaccatatgatacgcgtcagagcttgcgccgtagccgagcacctcacagaggatcggggcgtttctgccgattgcgctatccaatgattccaatactaagatgcccgcgccttcactcatgacaaacccatcgcgatcagcgtcaaacggccggcttgccgcggcggggtcttcgtttctcgctgacagcgcgtgggcattgccgaagctggctaatgacaaattcgtaatcgccgcttccgctcccccggcaaacataatatctgcgtcatcattccgaatggcgttgaatgcttccccgatcgacgtattgccgatggaacacgcggtgacgggagaaagtgaggggccgagcgcgcctaatctgatgctgatttgagcggcggccgcgtttgagatcatcatggggacaaggctcgggctcacttttcgcgctccccgttcatttaaagtatgaacgttatcaatcaaagtcgtgatgccgccgattcccgagccgacgtacacgccgaggcgttcacggtcaatctgatcgagctgaatcccggagctttcaagcgcctgttccgctgccgctaaagcaaactggctgaaacggtcaagccgtctcgcttcttttctgccccatctttcttctgcgtcaaaatcacggacggtgccggctatttttgtcttggagccggagacatcaaacgaatcgatgagagaaattcccgatgttccttccgtcaggtgtttccaaaatgtatgcacatcattgccgagaggtgaaatcactcccattccggtgatcacaactcttttcatggtcattcctccttcggtatgtatttattgtaactcgcaattatcctattacaagttgttgattatcctagtataatgaataccagggtaagagaggagagattcggtatgataccagaaggaagattgcaggcgctctcagagtttttaaaaacgcagcgggccaaaatttctccgcagatggccgggctgccgatgggcacacggagaagaacgcccgggctccgaagagaagaggtcgcgcaattagcaggcgtaagcaccacgtggtatacgtggctggagcagggcagagacattaaagtgtccgcagccgtattggacgcggtttccgatgcgctgcagctcaacaaagatgagagaaattatttatacgcgcttgccattgaggagggcgtgaagcagccgtttgccgcggaggaagaagcggttatcagcccgtcgctttcaaaaatcctgcaggagctccgttattgtcccaccattatctcggacaggcgctgtcatatcgtgggatggaatcaggccgcggctcacgtgtttttagattttgaacaaattcctcctgaaaaacggaatctcatagagctattgttttccagaaaagaattaagaagtttagctgtgaactgggagcactttgtgaaaggattcatcgccattttcagaacgtactacggccagtatgtagctgatacgtggtattctcagtttatagaagaaatggagaaaacgtattcggaatttcatacgctgtggaatgagagcgaagtcagctcggcacccgaagtattaattgagttccgccacgcgaaggcgggaaaaatggtctttaacctgacttcatttcaggttcagggcaacagtgatctgcgctgcagtgtgtatacgccggtagatcataccgaaacggaagcaaagctgaaaaagctcttcgaaaacaggtgaagaacagaaaaaacgggaggcggccgcctcccgtttcagtttaaaataaaagcatgagaccggcgatggccggtgttaaaaagatggctgatttcagaatgactttcggcacgtggttggtgaatttcgctccgacatatgcgccgcacatcgtgccgatcagcactttgaccaacagtatataatcgacaaatccttccgtcacataaccgagtcctccgccgaccgcaagcgggataatgacaagcatggtggtgccgaccgactggcggatggataagcgcaaaagaatcattaagccgatctggatgaaaggggcagagccgatcccgaacgttccggacaagattcctgcgatgataccgagtacaacggctttcacccatatgttcagattgctttgccgtccggaatcttcatgtgtttcttttacaataaataaccggactaaaataagcagagcggataaaaacagcatgcccgccgtcaagtaatgcagcaaatctgcagggataagggaagtaagccttgccccgaaaaacgaaccgaatgccgcaaaaacgccgacgatgaggccgattttcatctgaatattgccttcacggtagtggctgaaagcccccgataaacttgtgaaagccattccggcgagggaggtgcccaaagccgtatgaatcggtacgtgaaacagtatagttaaaagtgcaatgacaaaaccggctccccccgcgccgataaaccctagaataatcccgagaaggaacataacgagtataataagcacaatcttctcctccatttagatgcctgatcaccatgttcagatccgctttatcaggtttttaacaatcgatcgtcgtccgtcgaccgtcgtccattatctttatgttacctcaaatttgagggattggcaagaagccgaatcgcttttatacagagggtttacagctctttcaccatcactttttccccgtttgagtccagctctccattgaataagaagccgaatttttgataaagccgcaatgcgtgcacgttatcttcaaacagacttaaataaatccgtctgcactcatatattcgaacgagatggcggataagggcatcaagcaacagcctgcccaatccacgtccctgataacgttcatcaataaaaaaacggtcaagccacactctgccgttttcattttcctcatcatattccggaaaccatccgtacatggcaaagccgactaattccccgttaacataaagaccggccggctgataatgccggcaatcctcagcatcttgtaagcactcttccgcggtttcaataaatgaagtctggctttcccttacatgaagcgccagtatatcagcacggttttcttccgtgactgctctgatttcaatcgtcatacttgatactcctcttctgctttttctgagacggtaaagctttcattgcgtaagccatttgtgaatcagccttctctcggatacaatgatcatcataaaggatatggttaccgtatagtcaaggaggcattatgagcgaagacgtcagaaaatacttcacaacgggtgaatttgcaaaactgtgccacgtaaaaaaacaaaccctgttccattatgacgaaatcggcctgctttctccggaaatcaaaaaagcgaacggatacagatactattcctatcatcaattcgaactgttccaggttatcggtctgtttaaggaggtcggcgtgcccttgaagcagatcaaaccgctcttaacagacaaaacccctgagggtatcatcacgcttttaaaagagaaatcatcagaaatcgaaagcaaaatcaaaaagctggagcacctgcaaagaatgattcagacaaaggtgaagctgaccgaacaagctttggagacagacttctcctccgtctcattgcagcgattagatgaagagacacttatgataggacgacccgtactccatttgccagaacggcaatacactgcggccatttccgaattgatccgctatatgcgggtacatgaactcgatcaggggcatccggtcggcggactgtttgcgcgggagcagattctgaaaaaagaattctacaactacacccatttttatatgaagacagaagaaggcatagagaataatgacctccatatcaagccgaaagggctttatgccgtcgggtaccaaataggggatgaagcggaagcggcttaccgcagcatcatgcagtttattgaagagtatgggctggaaatgggcgattatgcatatgaagaatatttgcttgatgaggttgtggcggacgggtttgacaatcagatcacaagaatccagctgcaagtccgcaatcgataaagccgatgccgccgttcgtttacgtcttctgacaaaccttgtataatgagaaaaatcagattgcaattgaggtgaaaaacgatatgtttctagcgcccttatttgaacatgatgtaccggcagcacttctccgcccttaatggaggaaagtgactgcgcttctctccgttaaggcatatgacgtgacctaatatgataacggagggtgcatcaaattgaaaaatacattgttcggttcgatttatttggcattggccgccagtatctggggcggtatgtatgtcgtcgttaaagtagtggtagcggtcattccgccgcttgaactggtatggctgagatatgcggtggcgcttttttcgcttttgattctcagtttatttacacgccaatcctggaaagttcataaacgtgatttattactgatcgctgcgatcggattgatcggcaacacgatttcgatcgtcacgcaggaaatcggcacgaaattatcaaccgcgcagatgggtgcgattattacggcatccactcccgcatttatggttgtatttgcccggctgattttgaaagaacggttaacgctgaaaaaaggaatatcgacagggctggcgacgatcggagtattgctcattgtggggaacggagatctcaatatgtcgagccagttcggcggtctctcgcttctggctggggcgctgacatgggctttgatgtccgtgctgatgaaacgggttcccggccattactcaccgcttgtcgtcacaacgtattccatttgcgtcgcatttgtcatcctgaccccgtttacagagggcccgcttcgggagattcctttgtctcagcttgcccggcctgagatatggggcggacttttatatctgggtgtgatctcaaccgcctgcgcgttcatgctttggaatcgcggattacaattgctgaatgcggcaagcggcggtctgtttttcttctttcagccgctttccgggacattgctcggctggctgctgctgggagagacgatcggaggaaccttctggatcggggcggcccttattgtttcaggcgtcgttctcgtcatgaaagaaaaatagaaaatgaaaaaaagccattcagcaaatgaatggctttttctgatttcccggcaggattcgctccgccataaacagaaaacaaggagcagaaacggggtactctcaaggtgcaattcgggtttcgtttaattaacataacgggcggtggaaaaaatggagccaaaatggcttgaatgggcaaaacagcttcaatccgcggcgcaagcggggctggcttattccaaagacatatatgatattgagagatttgaagaaataagaaaaataagcgtggatatcatggcgcaacataccggcatcgacaaaagcatcatcaaagacgtattcgccggtgacacgggctatcccactccgaaagttgatatcagagcggcagtttttaaagatcagagcatattaatggtaagagagaaaagcgacggcagatgggcgctgccgggcggatgggctgatatcgggatttcaccgggcgagaccgctgtcaaagaagtaaaagaggagtcgggaatcgacgtaaagcccgttaaactgttagctgtaatggataagaaatgccattcccacccgccgtccgccgcccacgtttacaaagtgtttatccgatgcgagatcatcggcggccggctcagggagggaacggaaacaagcgcggccggcttttttgcggaaacggaactgccgccgctatctgaagcccgcaatacggaaagtcagattgaaaagatgtttgcatatctcaaacatccggacgaacccgtttattttgattaaggcagcaagcagaaagaaaagggggcccaagtataatggaggattcaattaaacagcaggcgcagcggcaatttgctaaaaacgccgcgaaatatgtgactagtcccggatacgccgcaggagaggatttggcatatctcatttcagcttccggtgccgaaaagcatatggacgtgctggatatcgcgacgggaggcggacatacggctaacgctctcgctcctctcgtacgctctgttatcgcatatgacctcacggaagaaatgttagcagccgctgaagcatttataaccggaaacggatggacgaacgtgtcattcgaaaaaggcgatgctgaaaagatgccgttttccgatgctgctttcgatatcgtcacatgcagaatcgcggcgcatcattttcccgatgtcagagcctttgttcatgaagcgtttcgggttgtcaaaccgggcggcagactgcttctcattgacaataccgcacctgaaaaggatgaatatgaccatttttataatgacattgaaaagaaacgggatcagagccactttcgggcgtggaaaaaaacagaatggcttcgttttctggagacagccggcttccggattgaatccgctgtctgctttttgaaaccatttcaatttaccgtctggtgtgaacgggcaagcctgactgaagagaaagccgcattactggaaaaacagatgctggatgctccttgtgatatacagcggtttttttctgtagaaaaggatcaatcaggccgtattgcgggcttcacaggtgaatcggcctgtttctgcgcgctccgtcccgtctgagacgaaaaaaccgctgtgcagttttcctgcccgcggttttttcgtattatctgttcttgatttgagaaataatagcggaagtgacatcttccgttgaatgttttccgccggcatcaggagtcagaataccgctgtttgtgaccgtttcaatagattgtaagaggagatggcccagttcctcttctccgaatgaatcgagcattaatttcgccgtccatatttggccgataggattggctattccttttccgacaatatccggggcggagccgtgaacaggctcaaacatggaaggatatttgccgtttacattgatgttggctgcgggagcgattccgacgcttcccataatcgccgcgccgatatctgtcagcacatctccgaacagattcgaagcgacaatgacatcaaagcgttcgggctgcgtgacaaagaaggccgccagtgcatcgatgtgctgggaatccgtctcgatcccggcgtactcccggctgacctctttaaagatgtcatcccagaacggcatcgagtgaacaataccgtttgatttcgtcgcgcttgtgacgtgtttccgccgattgaaacaagtttgtttgaatgctgactgagtgagtcaactccttaatcctccctgcaatccgcatactgttgactcactctgggaacgcatcatcacacaggctccctgacatgcagatcgatttccacttcagttttcctttttcattttgcacatttctcctgtaataaaaaaaagcaggccatcgcctgctcattatgtattacttagtcttatctatatttatattttactccagataccttagtagatgcatttgaccacttataaacggtaaccgtgtaagaaatctctaaaccctttttcttagaattagcagttttaaaaggcttaatcatattattagctcctacttgatacattaaaacacttaaaccagtagaagggtgtaccaacccaataatataaccgagaataagccctttattagaccccatgctgttatatctagaaaccacttttttcacctgattttttgtgtaataaacctttaccctttttttaagaagaacatcattatcacactgagtcccaagatttgtccgtcgacaagctgcttcagaacttggagcgaaagcagacaacacagtagcgagaatacaccccgctataaataatttagtaaccttctttaacacttttttctctcatcacctttactccgtttcgcaatgctataaatcactaatgcaccaacgaatatagcaaacaaaacagttaataatacattacttaagtcaaatacagaattaagtaataatactataattatatataatatcaaaaaaagtaaaatatttttttcatattttttacctctctaacttttttgtgtaaagacatatttgcggatgtaagatgccaatagaccatcttaatcgacctgtcttgtaggtgtatcctcttttttcaccacaattaaaggaggggttaccgtttccttgcagttcccctgctgcgatttgacatacaattttctctctctatctctgtaaaaaattgtatcatttctttgtcaaaaccccagccgaacgctgccggttcgaaaacagatcactcattccgtaccccgccgggaaaggaccgcgtattgaatggcgatttcatcttcaccctgatagatgctgctgccgacagagctgtactcaccttcccggacgtttacagatcaaaatcggagatgtagttaccggcgtatcttgatgggcagcccccacagcgaaacatgatcggggacgagtttttgattccccaccgctcccaaaaacaaagcatcaaagtgctgtaacgtttctaatccatcatccggcatcatagtcccgtgctccaaataatactcgcagctccgcggaaaagaagtgaaatcaaaggcaatgcctccatgtaattcggcgatcgcgttcaacacccgctccgcttgcggaacgacttctttccccacaccgtcccccggtatgccggcaatctagtatgtcttcatgtttccgtcacctccgaatgaattgttttcggtttacggaataccctcgaccaactatacttccatattacggcacctccgttatgctgacaagctctggaatgttgcttccatagataaactgttatatgatcttggtaacaataaggcctaaattgtatgaagaggtaggaaagatggataattttaaattagataagccaatcccgtattatctgcagttttattcccaattgaaaaaaatgatatttgacgggatttttaaaccgggtgaacggctgaatgagactcagctggcgaaggatttcggagtcagccggtcgccggtcagagaagccatgcggctccttgaaaaggacgggcttctgacggcagacgatcgaaacggctttgtcatttattctttgtccgttaaggatgttgaagagatttatcaaatcagaatgtcacttgaatcattggcggtcgaactggttattgatgaagcggctgagagtgaaattgacctcattgaaaaacagctgcgggagacggaagaagccatcaataaaggcgtcaaagagactgagattatttccttaaacgagtcgtttcatcggctccttgtggatttcagccgcaacagccggctggccatgctgcttgagcatgtcaatgtgctgattcatttttgcagagttcttaattttaaaggagatgaccgtgcggaggttatcctgcatgagcaccggaaagtctttgaagaaataaaaaagggcgataaaacaaaagccgtgcaatatatgacggagcatctcaagcatgatgaagaacatctgaaaggtgtgctcaaagcgggtgaaacagacgaatcatcacgatagacaaggtgaaaagccttgtctttttttgccgatgtcatcgaaccgtcataaagacctgacgaatgttccttgcatgattttttccgcgtcatttatgatggatatggaagagacgcaaaaaaggcaaaggagtttgaaaaatggcgaaacatattctgatgatcaattttcccgcagaaggacacgtaaacccgactttgggtatgacaaaggccttcagcgaacggggcgatcacgttcattatatctcaacggaaaaatacaaaagcagactggaaggagtaggagcgaaagttcatcttcacagcgatctgctcagaatgacacccattgatcccggcagtccgtccggcatacttgcatttttaaaggttcatatcaaaacgtcactggagattttacatattgtgcagcggctggcagaggacattcaattcgacgccgtctattatgataaatttggtgcgggagagttggtgcgggattatctcaacattcccggcatctcttcttcagcatccttcctgttcaatgaagaccgtctgaaaatactgccgctccatccggaatcgggcgtgccgtttcagccggacagggaatgtgaagagctgttggccgagatgaaagacaaatacggtgtcgcccctgacagcatggttcaatttatgaacaacacaggtgaattgaacgtcgtctatacaagcagatattttcagcccgaaagtgagacattcggagatgagtatttatttatcggtccgagttttccgaagagaaaagggcgcgtcgacttcccgattgactcattaaagaatgaaaaagtcatttatatctcaatgggaacggtgctcggggacacggaagcgtttttcaatctgtgcatagacgcgttctcagattttgaaggaaaagtagtcattgccgccggggaaaaagccgatctgtcgaaaatcaaacaggcgccggaaaactttatcatcgccccgtacgtgccgcagcttgaagtgctggagcaggccgacgtgtttgtcacgcatggcggaatgaacagtgtaaatgaaggcattcattatcaagtgccgctggtcgttattccgcatgataaagaccagccgatggttgcgcgccgcctgactgaattggatgcaggctgtacagtgcaaaaagatgaagtgagcgctgaaaaggtaaagcttgccgcggaagaagtgctgcataacggaaaatacaaacaaggcattcaagccattaatgaaagctttaaagaatgtatggacatgcaggatgttctggcccggatcgaccggtttattgaacaaaaacatgctcaataatacatggaaaaagcctgtttcctctgccaaagggaaacaggctttttataatggcttttagatgatgtgatgttcttcatttgcaagtttcacaagagtcagaagagattctgcctcacgtgcgttgagtgtttttgccagacggtctttttcaaagatctgctggccgaagacattcactgacgcctggtcaaccgccgtgtgccagttcttttgtgaatgattctcggaaaaagagaaaacaaacacggcaaagaccgctataagcatcgccatgacccaaaatttttgccgatttcctgctgctgacataggccgcctcctaacgttcattttactggtattagatcatatatgagctgtttttcatagagtaaagaagtcattatttcaggtagtccaaatgaaacggagcacagccgaaagcccgccggtcaggccgatgagccaattcatattttgttcatattttattaaaagtttatccaagcctgtcctttacagtggatataaccataaaacgctgctgaaaggggccttgaaaaatgcatattcatatgatcaacaaaaaccagtttgagagtgacttggaggcggccggcttcatccgtcaggcagatgatattatcggcaaaatgaaagaatacgtaacggaatacgcctcttcatccgaacggtttctgattgaaattcaaaccgtcatgaacgaatacaaagccgtcatctgtgcgatgttttcgactatggaaattgccggcgcaaaaaaagacgagaagcatgttgagttcgaagcctgcacagtgttgtgcgaataaaagaccttcattaaacctccgcggctgcctgaacggcagtttactgactggtgttccgggaagggaaaatattgaaacttctaaagcggctgttcgtataaaagagtaaatcagcttgtatatggaggttcgtgaaatgaacgataagaaaaaacaagcttttgaacagcttttcagcactttagacgaaagacatgaaataaacggagctgtattggcagcggaaaacggccgcatcttatatcagggttcattcggcgctgcagaactgaaaacaaagaggatgctgaatgaccaatcagtctttgaattggcctcagtatcgaagccgtttacagctttaggcgttatcattttagagcagcgagggaagctgcgttatgacgatatgatagagcggtggcttcctgattttccttatccgggcattaccattcggcatttactccatcatacgtcaggattgccggactatatggagttatttttaacacattgggaccgggacagaattgccgttaatcaagatgtgatcgatatgcttaagcagcataaaccggatgcttatttcccgccgggcaaggagtggctatacagtaatacggggtatgcggtgttagcggttattatagaaattgtatcaggcatgagttttgctgaatttatgaaacaagccgtatttcatccgcttcgtatgcacgatacgcggatttataacagaaggctgagtaaagaaaacattccaaactatgcatatggctatgtgtatgatgttcattccggagaatatgtgctgccggatgaacttgaggaaaccgattatgtcgtctttcttgacgggattcaaggtgacggaaccgttaactccactattagagatttatatctgtttgatcaggctctttataaggaagaaatcatcggcaaagagtctaaagatcaagcgtttacaccgggctattggaatgaagaagagcaattcggatacggatttggctggatgattcaaaacagcgcccaaaaagggaaggttatcagtcacgacggaggctggccgggttattcaactctgatgatccggtatattgaccagaacaaaacactgatttatctcagcaatatggaacaatcgtatcaatttgaacaagctgtgattgccgcggccgtaaacatcttatttgatcagccgtacgtgattccgaaacgtccggcggatcagaaaaaagcagatatcgatcctgcgatttacagcagatttaccggcaattactcatttcaggatgacacacatgcatcggtgacggtaaaagaaaaccgattgtatcttgcaatagacgggcagacaccatttgaattattcccaatgacggaaacccgttattttgtcagggcgctgccgcttgaaattgaatttgcaggtgataaagcacaaactgccccgcatttcgttttatatcaggacggcacagaagaaacggctttgcggatagactgactgacatgcaaaacaaaaccgccgtcctgagaagacggcggtaatagaaaagtcaaacccctttaatgacgcgaaattttcttttcggctctgacataaatatagaagaaaaaatcatagctccgaccattgtgatgtattccatataaagcgaaacttctgccaaaaccaaccccgcaatcattaaaacagcgcccaataccaccgcaaaaaccttcgttttcatgatgagttcccctattatctgataattaaattatactgcatctctattaatgtgtacattttgtgaacaatttcacctgataaaaggcaataaagagagagttgaagaattaggagaaatgacaggccatctttttgttttaccgaagaaacgaaagggaaaatgaaaaatcaaaaaggcaaaggagttcttgaaatgaaagcgagactatttttattcagcatgtttctcctgatccccgttctggcgcttgccggatgcaacggtcaatcttcaggaggaagcgaaaaagcgaaagacaaagaaacgcactctcacgaagacatgaatcactcaggttcatccgaggtgccgaaaggtttaaagaaagccgaaaatccgacttataaagtcggcagtgacgtcatgattttagcttctcatatgaaaggcatgaaaaatgcgcaaggaaccgtaaaaggtgcttatgatacaacggtttacagtgtatcttacactccggaaacgggaggaaagcgcgtcgaagatcacaaatgggtcattcaggaagagctgaagggcgccggtgataaaacgttaaaaccgggtgacaaggccgtgatcgaggcatcccatatgaaaggcatgaagggtgccgaagccgttattgattcagccaaaaagacaaccgtttatatggtcgactatacaccgactgacggcggccaaaaagtaaccaatcataaatgggtgacagaagacgagcttgctgccgcaaaataaaaagaccgccaaagccgaaggaactcctttggcttttttgcggtctcacatttatgcggattttcttttcaaggcaggtctcgttaaagagaatacagctaacgcgacagcgataatgacaatcaaaccgccgcaccaggctgttgctgtgacagaaccggtttgtccgatcacgccgccgccgatggctgacccgagcgcgatgccgatctgcaaagcggacgtgttgaagctttgctgaatatcggaagactcaggcgcaattttgattaaatagctttgctgcgccggcgcaaggctccagctgagcaatccccagatcaccatcgcaggcaggaaaatgattaaagaaaccgttgtcagcggaagaataaacaggatcagagcgaaagaaacggtcacaagcatgatgcttttaaatgctcctaaacggtcatacagccagcctccgaacgggccgccgcataccgctgacagaccgaacaaaaagtagcatacactgacccaaacggaactcaaatgaagcgttctttccaaaaaaggcgcaaagtaggcatagagtgtgtaatgccccgccaatgtaaacaaggtgacaaggtgtgcgctggcaattttggcggtcccgatcgtcttgatctgctcacgaaacggaatcattttttcagcaggtattttttcgaaaaagacgctgataatcagcatggaaatgagagataatacgccgattcccaagaacagaacacgccatccgaaggcattgctgatgataatgccgacaggcacgcctaaagcgattgcggagctgaaccccatgaaaatgatgccgatcgcccgcgctctgtattcaggcgccacgattttaggagcaatcgttaaagaaaggacgacaatcagccctgtgctcatggaagcgagcacccgtgacaccataagaacggcgaaattgggactgaaataagcgaccagattacttaggaagaaaataaacagtgcgattaaataaagccgctttcgttcagcctttgccgtcactgccaaaagcagcgggccggataccgcgtaaccgagcgcaaacacgctgatcagctgccccgcgctgacaatggatatatctaagtcggaagcgatttgcggaagaataccgcccacaattaattcaaccaatccgactgcgatggtagatgctgcaagcagaaatactttgaaattcatgtacagatactcctttttttattttttagaaaataaaaaatcctgattacaaaaagtgtacgggacaatttttgtaatcaggattttacggttcctggtagacaccctcaaaccatatcattgaggttatacaatatattgcaatattcggttgtgtccgtttctgcaaaaaattctaccataatagtgagggagattccatagaaaattcgaggaaatcctttcaatttcaatatcggcggctgtaacgtcattgatgaagcagggaaaaaaatttatgataaccgtaaggagtctatacagatcaaacattacacagccggaggaaaccgatgaataagtacgaaaaaatcgccaacgaaatgagaaagaggattaaaagcagtgtatatgacatagatcagccgatcccggatgaaaagacgctcgctgcggagttcgggtgcagccggatgacgatgaagcgggcgcttgatacacttgcggctgaagggatgcttttcagaaaaagagggcacggcacatttatcattcaatcagccatgcaggatgagcacgttcacgtagtcagcaacgaaattctcggcttgagcaatttgttaaaaggcaaaaatatcaagagcaaggtcatccggtttgaagtgcagtttccgtctcaagatgtcgccgcacatttggctatcgatgaaaagactcccgtctattatgtagtgaggctcagaatcgttgaaggcgaaccgtacgttcttgaaaaaacgtacatgccggcgagccttatacccggcattaatgacgaggtgctcaaccattccatctacgatcatattacgcggggattgcagctcaaaatcgcgggcacacacagaaaaatcagagcgtgcaagtcggatgatatggatcagcaatatctcggctgccggccggatgacccgatacttgaagtcgagcatgtaggctttttggacaacggcactccctttgaatattcattttcccgccaccgtcatgacaagtttgtcgtgacctcagtcaatataaaacgttcataaaagcgccgaagagtgagagaaaaactcactctttttttgttgccgctgatttacatcgtcgcttcttttatgttatattacccaatgatagaatcatcctacaaatttcagaggtgttttgatggagatatccaaaacaagcagactgtcgctcgtagaacaagtggtggcgcaaattgaatcgttaattcaatcggataaatggccggtcgggacgcgcattccccctgagctggatttaatgaagcaatttgatgtgagccgaaacacgttgcgtgaggccattcgggcgctcgtacatgccggcctgctgcagacaaggcaggggagcggtacgtatgtcagctcatccagtgttctcggcgcggcattttaccgccatattaaaaaatcaaatttgcttgaaacattagaagtcagatacgcactcgaaagagaagctgcacgattggcggcggaaaggcgtaatgacgaagacctgaaagcactgaaggcatgcttggatgaatgtgaagcggccttgcaaaatgaagatcgaaaacggtatgccgaagccgacattaagctgcacaaaacaattgtacaggcggcccataacaatatgctttctgatctatacgagcatatgacggaggcgctttgtgcgtcagtccataacctgttggaaatcacccctgctatccggatccacacccagcttgccgccgcgattatcggacagaaaccggatcaggccatggaggccgtcaaccaatacatcacagtatttaaagatacaatacacatggaggatgaacatgaaaattaaagacgaacatcaagttctgcaagcaagtcagcgtaaaaaactgatattgctggtcatcggagtcatattgataggggccaacctcagagcgcctctgacatcggtcggaccgctcgtttcctcaattcgggacagcctcggcatgaccaatgcggctgccggcaccattacgacagtgccgcttttggcctttgcatgtctgtcgccgtttgttcctttattgtcccggcgcttcgggaccgagattgtcttactgtcatcattaattgtcctgacagccggaactctgctgcgctccatcgccggaatcggcactctctttttcggaacgatcctgttgggattgtcgatcgccgtatgcaacgtcctgctgccgagtctcattaaacataagtttcccggaaatttaggcatcatgaccggcgtctactcggtttctatgaatctgtgcggcgcgattgcatccggcatcagcgtgccgatcgcctcttcagcgggggtaggctggaaaggcgcgctcggctgctgggctatcctttcttttattgcgttcgtcatgtggattccgcaaatgcgaggacgcgaactgcccgtccgcacgactgggacaaacggagagaaaaaaaacagtctgatgcggtctccgctggcttggaaggtaacgatgttcatggggctgcaatcccttattttttacaccgtcatcgcttggctgccggaaattcttcagcagaatggactcagctcaagtaaggcgggatggatgctttcattaatgcaattctcagtcctgccgattacttttatcgtgccgatcgctgccgctaaaatgaaaaatcagcgcgcactcgccggactgacggctttatttttccttatcggcattgccggcgttcttttcggaagcccggctctcactccgctatgggtcattttgatcggaattgcgggaggctgtgcgttcagtctggcgatgatgttcttcagcctgcggacccggcatgttcatgaagccgcggcgctttccggcatggcccagtcattcggatacctgcttgccgcgttcgggccgcttgtattcggtttgctgcatgacatcacgcacggctggacggttccgttattcatgctgatcgcagtctctgttctgattttcattttcggagtcggagcgggaaaagcggaacagatcaaaacagcataaaaaaacaaaggacccgtttagggtcctttgttttttatttaaaaagctgtctcaggccgttacgctgtcagttttaagccgatgacaccgatgaggataagccccagagacaccaattgtgacagattgaatttttctttaaaccaaagtatgcctacggccgaaacgccgatgcttcccatgccggtccaagccgcatacgcgacacctgtgggaagaacctgcatcgctccggaaaggcaaaagaatgaaagcataaagcctgttaccatgacaatcagcggccacttttttttaaaaccgtcaatatgtttcatggcaacggccgctacaacttcctccgctccggcaataaataacagcagccatgccattaatgttcaccccttgtttcagtttctttcgtaaataccttcattcctaaaatgccggacaacagcaaagccaaaaagaatatttgtccgattgaaaacgattcgcctaaaatgacgcccgttacatatgtgccgacggtgcctattccgacaaaaacggtatatgcggcagccatcggaatttttttataagagcggatcagcatcagaaagctgacggcaatcaaaaggaaaataccaatccaatcaaagagcgaatccgcatgcttcagggcggacgcccaaactacttctaacaatccggctatcaatacaagcagccaatacatgatacagtcacctcagttatgaatgaatgtcagtcatttttacggcggtcaaaaatgatcggtctccgccaatcatttctgcaagcttcttttgagaaagctgaatatttcttttttatatacttcgagatcgacatcctgttcacagccgatataaaaccgttcagccgcgttctcgacaacgttgataatcgttctggccgtccatctgacatgaatgccgctgatgacctcaccctgttcaatggccgtattgatcatgccttccagccaggaataataaggctgataaatggcttcccatttctccattgaatgatcgatggcaagaccggaataacagagaacgataatatctttatgaagccgggtgatgtgaaatgtctcatctaccaaaatgtccagcaacgtccaaaaatcttcagaaccgtccgttttcccttttattctgtccagcgtagtgtcgagcaggttttctgcaatcgcggatatcagtgcgtttttagaagaaaaatataagtaaaacgtaccttgggccgttccggcttttttgacgatttctgaaatggatgctttgtctaatcctttttcagaaatgacttcaatcgcggcttgcaggatcttttcgtattttcccgagctttgttttgccaatagaggggttcctccttttatgaatgactgtcattcattttatcgcatgttcgcttttttgtcatcccttaacataaaaataccggaaagaagaccatacttctttccggcattcgtcatttatcactgtcgatcatagccttcggcagacctgtatattttgcccagtaataaataccgagcgaaccgatggcgatcagaatcaggtcaagcggattgctgataatgcccaatccgtggccgaacgagccgagataggagaaaatcagcatcatgacataaaagccgacgatccaccatgctgatttcagctgctggcgtatgctgacatcatctttgggagcatatttactgaaacagagatagatcagaaacatgacaatttgagaaccgagaagccaggatacggtgcgccatccggaccaatatacaatataagaggtaaaaataaacgacagcggcccgatgatgctcatcccttttaaataaaacggtctgttaatgttctttgcgttgactctcagcgccgcagaagaaatcggcgcaatcgcataagacagaatcaatgcgacggagcatacgttaacaagagcgttccaagaagggaacggaagcgtccaaaaaacagccagaccgaacgaaagccaaagggaggcacgcggtgtcccggtttctttattgactttagaaaaaatgctgaataatgttccgtttctggcccaggcatagacgagacgtgaagtcgtattcataaagatatttccgttaccgcccggtgataaaatcgcatctaaaatgaccaatgtcgccagccaccccaaaccgagcaagacggcgatatctttgaacggaagggagaattcagtcccgatagccggccatccgtgcttcagggtatccccgggatcgccccgataaaagtgagctgcagcacggtataaataatagtagaaacgataatacaaacaatcaatgcaatcggaatgttccgcttcggattctgcacttcactcgcgacagccacaatcggatgcagcccaaggtatgcaaacatgacgccgcctgtggaaatcgcggcctgaattccggtgaaaccaaaaggcgcgaatccgtgaacggtcatattgcccgggtgaaaatgaaaaatcagtacaacaattaccgtaatcggtacgacatatttaaaaatcgaaataatgaagtttgctttcgcaaaggttttgacactccagtaattgaggaggaagaacaggcagagcagcgcaaattgcaatatccatccggcaattgtcggagaatcagagccttttacggtcaaaccgggaaaccaatacgccacgtattggcggaccgccgttacttctatagaaataagactcgtgtatgccacaatggtgacaaaggaaattaaatatccgaccaggtgtccgtgtgaatatacgggataccggataattcccccggtccgcggcagcgcggcgcccagttccgcataaaccaagccgatcaataagatgattcccccgccgatcagccaggaaaaaacgcctgacgggcccgctttagaggcgacgttactgacggcaaacagccatgccgaaccgaatatggctcccatgccgattaaaataagatcaaaaagtgacatagttttctggaagtttccttgcttagacattcgctgcctccttaaaaaagacattgttctctttacataattcccattatcattcaaacatacccagccggccggctggaaaattaggacaactttcgaaacgaagtatgtacagaaatgtgctcacatcaaaatcacggccgtatggcaagatctcccggcttatattccccgttttgaacacattcaaacctcatattcagaaaaacaaaaaacgcccgaaacaggcgttttttgttacaagttcatatctttcagtccggggctgtgctcattcggaagctcgggaagttccggcacggggaaacctttaggaggctctgacacacttaattcgccgccgtttcggctcggcgtcgttccctgcagaatttctccgatccgtgtcggatccagtctgaaattaaattgggtattatgataacccatttcaacgaatttccggcattccgggtatttttcaatatcataattcggcacgggaaataatttgccccattcgacacccagtgtttccagcgcttttgtaaatgcattttgatgggcgttgtcacggacgatcagaaaaccgagtgtttctctgaacgtctggtttgagctcatttcataaatgcgcgtcttttgcagcacgccggttgattccagcacgacattgtccaatagatcggaaatcagattcccgtggttgtatacccaagacccgttccatggattgccgcttgcatcggcaggaagagaactttgcgccccgataatataatggtgcggattggcgtgtttaaccgcttcgtctagcggcgcctgatctgctgcctgatttccggcgccctcagcgccgctttcatccagcagcgcattaatcgtatgctggacgagctcaacgtgtgcaatttcttctaaaaatacgccgcgaagcaggtcgcggaactgcttttcttttcctctgaaattagagctttggaaaaagtattgcatcatcgtccgcatttccccgtaatgcccgcctaaaatttcctgaagcaccttggccgcggccgggtccggcttgtccggtttaatgatattgatcagctcttctttgtaataatacataaacagcgcccctgaaagaagttttcggttcttctgttagtgtctttgcaaagtcagtttttatgtatcggcatcaaaaaaaggacggaaagcgtgtccgtccttttgtgttaagcctcaaccgccccgcgaagtttcgtgttgacaagcccgttccatccttgatccatcgtactgtgaatctcggagcttttccgattgactttattgatgacggcttccggctctttccatccgccgtgaatgagagtgaattccgtatctccgctttccgtttcctttaagacaaaagagacgatccagccttccgtatcccacgaaaaagaaaggcggtacggcgcttcaatatccagcagcttgcacggagacggaccgaacggagattccagctgaaactcactgtcttcttgaggcgtgaaatcattcggcataaaccagagagacaggccgtccgccgtagagaccgtatcccagacaacttgtatcggcgccttgaaaacggcggtatgaataatgtccggtaatggctgattgctgttgttgtttttgttatctttgttttgtttatcagacatgatgcgtaaccactctttcgctgtttttacttttgatcatactacacagggcaggacatttgaaaacaaatcaaacttattttatgcttttccaaagccattcaattcattttaaggagacgtagtgatgacagatcaatttaaagcgttagtagtcgatcagcgtgaagaccggttttcagtcagcgtacgggagctggcggttcaggaccttcccgagggtgaagtgctgattaaggtttgctactcaggggtgaattataaagacagcttggctgccattcctgacggcaagatcgtaacctcgtatcctttcgtgccgggaattgatttagcgggaatcgtcgtttcttcagatgacgcccgttttaaagaaggggacaaagtcattgcgacaagctacggcataggcgtttcccattttggcggctatagcgggctggcccgcattccggcagattggatcgtgccgctgcctgaaggtctgacacttaaagaagccatgacgatcggaaccgccggcttcactgccgcattgtccgtccagcgtcttgaagaaaaccatgccgctcctgaaaaaggaaaggtgctggtgacgggagcgacagggggcgtcggaagctttgccgtctccattctttcaaccttaggttatgaggtcgaggccagtacgggaaaagaagaagaaagcgggtatttgaagagcctcggagcaaagacggtcattcaccgcgacgaagtgtataacggcacgttaaaaccaatgcaaaaacaaaaatgggcagcggccgtcgatccggtcggaggtgagccgcttgcttcagttctcagtcagattcagtacggcggatcagttgctgtgagcggactgacagcgggaacgaaactcccggctacagtctttccgtttatattgcgcggcgtcagtctcttgggaattgattccgtattctgtccgatggagacaagaaagaaaacatggcagcgtttagctgatgacttcaagcctgcagatctggaggcctttattcaaaaggaaattacacttgaagagctgccggatacgcttcctgcccttttaaaaggagaagcgagagggagaacgattgttacaataaacgaagaataaaacaaaaacccccaatcagcagttgggggttttcaatatgtaatcaattattgattataataggggtaattaattgagtatattatggaaataaattgatataaaacgaaaattgattatatataggtgatataaaggtgagttataaaattttctgaaatatttattgactgaaagcgcttttaaaattatgatattaacataagtaccaataatatcattataacttcactacaaagtaactataaaataacaatatgacgagagggggagagcgaataatcactataaatgataacgctttcggaacattttcttcttatataactgttttggacggtcagaccttgtatgcagacgttagaggtgtaaatattgataactgaatattccgatattatctctgtgtaaaaactaggaggatttgaagatgaataaaaatagcagccagcattcatttttgagaaccatcattttagtatcgacattcggggggcttcttttcggctacgataccggtgtgattaatggggcgctgccgtttatggcggaagctgaccagcttaatcttaccgctttgactgaagggatggtggcgagctccctgctcttgggcgctgcgatcggcgcggttttcggagggagattgtcggactataacggcagacgtaaaaatatccttatccttgccgttttgttctttatagcgacgcttggatgtacactggcgcctaacgtatcggttatgatcatctcccgttttctgctggggcttgccgtcgggggagcatccgtaaccgttccggcatatttggctgaaatgtcgccggcggaaagccgagggagaatggttacccaaaatgaattgatgattgtaacgggccagctgcttgccttcacgtgtaatgctatcatcggcaatgtgcttggtgatacctctcacgcttggcgttatatgctcgttatcgcggcccttccggcggtattcttgtttttcggtatgctgaaagttcctgaaagtccgcgctggctggtttctaaaggaagaaaagaagatgctttgcacgttctccggcgaataaggaatgaagagaaagcgaagtctgagctcgctgagattgaatctgcctttcataaggaagctcagatggagcaggcgacctttaaggatcttgccgttccgtgggtgcgccgcattgtgtttatcgggatcggaattgcggtagtgcagcagctcaccggcgtgaattcaattatgtattatggaactcaaattttaaaagatgccggttttgagacaaaagccgcattaatcggcaatatcgctaacggtgtgatttcggtgctcgcgacttttgtgggaatatggcttctcggcaaagtcggccgccgcccgatgctgatgacggggctgatcggaacgactgcggtgctgcttttgatcggagttctgtctgtcgtgctgaaaggatcgcctgctcttccttatgtggttctttcattaacagtcactttccttgcgtttcagcagggggctgtctctccggtgacctggctgatgctgtcggagatattcccgctgcgattgcgggggcttggtatgggggtgactgtcttctgcctctggatcgtgaacttcattgttggtttaacttttccggtcatgctcgcaaacatcggattgtctgcaaccttcttcatttttgtcctgttagggatagcgtccgttatatttgtgaaaaggttccttccggaaacgaaaggtctttcgctcgaacagcttgaacaaaacttccgtacctatgaaaaaacagatcgtaatagcgcagaagccgaggtgagcgggtaatctgaatagacgcggggttcctgggaatcctgctttttatttattatatagaagggaataataagcggaaaaaaagtttcgtaaaagtgttgacctaatttaaagtgcgtggtatattattaaacgtcgctgatgaacaaagcgataacgacaaatgagaaaatgatctttttaaaaaagactttacaaattctcgaaagcgtgtataataaatgaggtcgagaaaaaagacttcgaaaagaaataaaataacacttgacatcataactgattggtagtatgatagttaagtcgcctgataagcgcccgtagctcaattggatagagcgtttgactacggatcaaaaggttaggggttcgactcctctcgggcgcgccaattcaaatgcgggtgtagtttagtggtaaaacctcagccttccaagctgatgtcgtgagttcgattctcatcacccgctccattataatgatctttgaaaactaaacaagacaaaacgtacctgttaattcaaagttttaaataaatcgcacagcgatgtgcgtagtcagtcaaactactttatcggagagtttgatcctggctcaggacgaacgctggcggcgtgcctaatacatgcaagtcgagcggacagatgggagcttgctccctgatgttagcggcggacgggtgagtaacacgtgggtaacctgcctgtaagactgggataactccgggaaaccggggctaataccggatggttgtctgaaccgcatggttcagacataaaaggtggcttcggctaccacttacagatggacccgcggcgcattagctagttggtgaggtaacggctcaccaaggcgacgatgcgtagccgacctgagagggtgatcggccacactgggactgagacacggcccagactcctacgggaggcagcagtagggaatcttccgcaatggacgaaagtctgacggagcaacgccgcgtgagtgatgaaggttttcggatcgtaaagctctgttgttagggaagaacaagtgccgttcaaatagggcggcaccttgacggtacctaaccagaaagccacggctaactacgtgccagcagccgcggtaatacgtaggtggcaagcgttgtccggaattattgggcgtaaagggctcgcaggcggtttcttaagtctgatgtgaaagcccccggctcaaccggggagggtcattggaaactggggaacttgagtgcagaagaggagagtggaattccacgtgtagcggtgaaatgcgtagagatgtggaggaacaccagtggcgaaggcgactctctggtctgtaactgacgctgaggagcgaaagcgtggggagcgaacaggattagataccctggtagtccacgccgtaaacgatgagtgctaagtgttagggggtttccgccccttagtgctgcagctaacgcattaagcactccgcctggggagtacggtcgcaagactgaaactcaaaggaattgacgggggcccgcacaagcggtggagcatgtggtttaattcgaagcaacgcgaagaaccttaccaggtcttgacatcctctgacaatcctagagataggacgtccccttcggggcagagtgacaggtggtgcatggttgtcgtcagctcgtgtcgtgagatgttgggttaagtcccgcaacgagcgcaacccttgatcttagttgccagcattcagttgggcactctaaggtgactgccggtgacaaaccggaggaaggtggggatgacgtcaaatcatcatgccccttatgacctgggctacacacgtgctacaatggacagaacaaagggcagcgaaaccgcgaggttaagccaatcccacaaatctgttctcagttcggatcgcagtctgcaactcgactgcgtgaagctggaatcgctagtaatcgcggatcagcatgccgcggtgaatacgttcccgggccttgtacacaccgcccgtcacaccacgagagtttgtaacacccgaagtcggtgaggtaacctttatggagccagccgccgaaggtgggacagatgattggggtgaagtcgtaacaaggtagccgtatcggaaggtgcggctggatcacctcctttctaaggattttaacggaatataagaccttgggtcttataaacagaacgttccctgtcttgtttagttttgaaggatcattcgattcttcgagatattgttctttgaaaactagataacagaagtaattcacattcaattagtaatgcaagatatcacgtagtgattctttttaacggttaagttagaaagggcgcacggtggatgccttggcactaggagccgatgaaggacgggacgaacaccgatatgcttcggggagctgtaagcaagctttgatccggagatttccgaatggggaaacccaccactcgtaatggagtggtatccatatctgaatacataggatatgagaaggcagacccggggaactgaaacatctaagtacccggaggaagagaaagcaaatgcgattccctgagtagcggcgagcgaaacgggaccagcccaaaccaagaggcttgcctcttggggttgtaggacactctgtacggagttacaaaggaacgaggtagatgaagaggtctggaaaggcccgccataggaggtaacagccctgtagtcaaaacttcgttctctcctgagtggatcctgagtacggcggaacacgtgaaattccgtcggaatccgggaggaccatctcccaaggctaaatactccctagtgaccgatagtgaaccagtaccgtgagggaaaggtgaaaagcaccccggaaggggagtgaaagagatcctgaaaccgtgtgcctacaagtagtcagagcccgttaacgggtgatggcgtgccttttgtagaatgaaccggcgagttacgatcccgtgcaaggttaagcagaagatgcggagccgcagcgaaagcgagtctgaatagggcgaattgagtacgtggtcgtagacccgaaaccaggtgatctacccatgtccagggtgaagttcaggtaacactgaatggaggcccgaacccacgcacgttgaaaagtgcggggatgaggtgtgggtaggggtgaaatgccaatcgaacctggagatagctggttctctccgaaatagctttagggctagcctcaaggtaagagtctcggaggtagagcactgattggactaggggcccctaccgggttaccgaattcagtcaaactccgaatgccgatgacttatccttgggagtcagactgcgagtgataagatccgtagtcgaaagggaaacagcccagaccgccagctaaggtcccaaagtatacgttaagtggaaaaggatgtggagttgcttagacaaccaggatgttggcttagaagcagccaccatttaaagagtgcgtaatagctcactggtcgagtgactctgcgccgaaaatgtaccggggctaaacgtatcaccgaagctgcggactgttcttcgaacagtggtaggagagcgttctaagggctgtgaagcaagaccggaaggacttgtggagcgcttagaagtgagaatgccggtatgagtagcgaaagaggggtgagaatcccctccaccgaatgcctaaggtttcctgaggaaggctcgtccgctcagggttagtcgggacctaagccgaggccgaaaggcgtaggcgatggataacaggttgatattcctgtaccacctcctcaccatttgagcaatgggggacgcaggaggatagggtaagcgcggtattggatatccgcgtccaagcagttaggctgggaaataggcaaatccgtttcccgtgaaggctgagctgtgatggcgagcgaattatagtagcgaagttcctgattccacactgccaagaaaagcctctagcgaggtgagaggtgcccgtaccgcaaaccgacacaggtaggcgaggagagaatcctaaggtgatcgagagaactctcgttaaggaactcggcaaaatgaccccgtaacttcgggagaaggggtgctctgttagggtgcaagcccgagagagccgcagtgaataggcccaggcgactgtttagcaaaaacacaggtctctgcgaagccgtaaggcgaagtataggggctgacgcctgcccggtgctggaaggttaagaggagcgcttagcgtaagcgaaggtgcgaattgaagccccagtaaacggcggccgtaactataacggtcctaaggtagcgaaattccttgtcgggtaagttccgacccgcacgaaaggcgcaacgatctgggcactgtctcaacgagagactcggtgaaattatagtacctgtgaagatgcaggttacccgcgacaggacggaaagaccccgtggagctttactgcagcctgatattgaatgttggtacagcttgtacaggataggtaggagccttggaaaccggagcgccagcttcggtggaggcatcggtgggatactaccctggctgtattgaccttctaacccgccgcccttatcgggcggggagacagtgtcaggtgggcagtttgactggggcggtcgcctcctaaaaggtaacggaggcgcccaaaggttccctcagaatggttggaaatcattcgcagagtgtaaaggcacaagggagcttgactgcgagacctacaagtcgagcagggacgaaagtcgggcttagtgatccggtggttccgcatggaagggccatcgctcaacggataaaagctaccccggggataacaggcttatctcccccaagagtccacatcgacggggaggtttggcacctcgatgtcggctcatcgcatcctggggctgtagtcggtcccaagggttgggctgttcgcccattaaagcggtacgcgagctgggttcagaacgtcgtgagacagttcggtccctatccgtcgcgggcgcaggaaatttgagaggagctgtccttagtacgagaggaccgggatggacgcaccgctggtgtaccagttgttctgccaagggcatcgctgggtagctatgtgcggacgggataagtgctgaaagcatctaagcatgaagccccctcaagatgagatttcccattccgcaaggaagtaagatccctgaaagatgatcaggttgataggtctgaggtggaagtgtggcgacacatggagctgacagatactaatcgatcgaggacttaaccaatttgaatgtatgcttactgttatctagttttgagagaacactctcaatggtttggtggcgatagcgaagaggtcacacccgttcccatgccgaacacggaagttaagctcttcagcgccgatggtagtcggggtttccccctgtgagagtaggacgccgccaagcttttctaaaattttatcatcgcggggtggagcagttcggtagctcgtcgggctcataacccgaaggtcgcaggttcaaatcctgcccccgcaaccaaaaattaaatggtccggtagttcagttggttagaatgcctgcctgtcacgcaggaggtcgcgggttcgagtcccgtccggaccgccatttttattgtaaacgaaacgatcatgttttcgttttttttgtgttttcttttaatgctggcagcttggtatctaaccaagctttcttttatatcgttaaagtcttggatattgaaacataatccgatacactagaaagagctgtatttcacaagagcgtcagaaaggaagacgggagatatatggatgagtttgatttgattcacagtattacaccgcattcgcattatcatccttccgtcgatgtagggatcggtgatgatggtgcggtttatacagcgtcaccccacatgcagcaaattgtctgccttgatacaatggtggagaatgtccattttaaattagagtattcctctcctcatgatatcggttataaggcgcttgctgttaacattagtgacgtggcggcgatgggaggcattccgaagttttatttggtgtctctagcggttccttcttgctggcagaaagctgacgtccaggcaatgtatgaaggaatggcggaactggcgaaactatatcaaatggatttgatcgggggagataccgtctccgcttccggtcaagccgtaattaccgttactgtcatcggagaagttgagaaggattgcgcttgtctgcgaagctcggcaagacccggggatgttgtgtttgttacgggggatatcggctcgtccgcagcaggactgtctcttttgttgggagaaacacatccttctgcttttcatacgagtgattattttatccaaaaacataaacggcccgttccgagagttcaagtcggccgcttctgctctcagcttcagcgcgcggctctgaatgatatcagtgacggattggccagtgagctgcatgaaatagctgcggcaagttcagttacgatagaaattgaagaacaacttctgccggtgcatccggatttgcctgaggcagattctgagtggaagaaatgggtgttattcggcggtgaagattttgaattggttggaacggtttctcagcaagagtggacctctctgcttgattactgcactcaatcgggcattccgattgcgaagataggggcggtatctgaacggaaggaagcatgtgttcttttgacagccaatgatcagagacaaatcgtccttgagaaaaaaggatacaatcattttaaataagacgggtgactcactttgaagacattacaatggagaacgaaaaaccccgaagaaacgaaagccgtagccaagcttgccgcttctttggcaaagccgggagacattttgacactggaaggcgacttaggcgcgggaaaaacgacttttacaaagggttttgccgaaggactgggaatcacgagagtggtaaacagcccgacttttacaattataaaagaataccatgacggttcgattcctctatatcatatggacgtgtatcgtatggaggatgaaagcgaagacttagggcttgaagaatattttgagggacaaggcgtctgtttaattgaatgggctcatttaattcaggatcagctgcctgctgaacggctgcagatcgtcatcaagagagccggtgatgaggcaagggacattacctttacggcttgcggaacacggtatgaaacgctttgtgaggagataaataaacatgacaatactggcaattgatacgtcaaattacacgctgggtgccgcgctcgttcgagagaaaacggtgatggcggagtatattacatatttaaaaaagaatcattccgtgcgggcgatgcctgctgtcaattcattgctgaaggattgcggcctaacaccgcaggaccttacgaaaatagcggtggcgaaaggacctggatcgtacacaggtgtcagaatcggtgtgacgctggcaaaaacattggcatggtcgctgaagcttccggtttccgctgtctcgagcctggaggtgctggcggctaacggacggcactttcaaggactgatctgcccgttatttgatgcccggcgcggacaggtatatacgggactttatgaatatcaggacggccgcttacaatccgttcttcctgatcagaatgtgcttttgactgattggctcgacatgctgaaagaaaaagcgtctccggttttatttttagggcatgatacagccattcatgaagaaaccattctgcatgggctgacaaatcaagcagtgataggaacggctgcacagcataatccgcggccgtcagagctggcgtttttaggcttggaaaaagaagaagcggatgtccacagccttgttccggattatttgcgtctggcagaggctgaagcgaaatggatggaatctcaaaaatagggtgatagggatgaaaacgaaaacggcgattcgaagcatgcggccggaagatattgatcaaatttatgaaattgaaacagcatcctttacttctccgtggacgaaggattcattttatcatgagcttttggaaaatccgtatgcccactaccttgtcattgaaaaggacggctgtctggcggggtattgcggaatctggattattatagatgacgcgcagattacgaacatagccattaagccggaatatcggggccaatcgttgggagaagcgctgtttcgctctgcgatagaattgtgcagagaaaaaaaggcaagaaggctctctctcgaagtcagggtctcaaatcatcccgcccaatccttatataagaaattcggtcttcaggccggaggaatcagaaaacaatactatacagataacggggaagatgcgttattaatgtgggtgacattacatgagtgaaaaacaagatatttatgtattaggaatcgaaacaagctgtgatgaaactgcggcctcagtcgtaaaaaacggaaaagacatcatttcaaacgttgtcgcttctcaaattgaaagccataaacgtttcggcggggtcgtgcctgaaatagcgtccagacatcatgtggagcagattacccttgtgattgaggaagctctttcaaaggcggagatgggctttgatgatcttgatgcgattgccgtaacggaaggacccggacttgtcggagccctgttaatcggggtcaatgcggcaaaggcgttaagctttgcccatcaaataccgttagtcggcgtccatcacattgcgggccatatttatgcaaacaggctgataggagagcttcagttcccggcgcttgctttggttgtgtcaggcggacatacggaattggtttatatgaaagaacacggttcattcgaggttatcggtgaaacgctggatgatgccgcaggcgaagcttacgacaaagtggcaagaacgatggggcttccttatccgggagggccgcagattgataagctggctgctgcgggaacggattccattccgcttccgcgtgcgtggctggaagaagggtcttacaatttcagcttcagcggcctgaaatcagccgtgattaacacgcttcataacgcctcgcaaaaaaatgaggtgattcctccggaggatcttgccgcaagctttcagcagagtgtcattgatgtactgacggcaaaaacctctaaggccgcgaaagaatacagggttaaacaagtgctgcttgcagggggcgtagccgctaacaaagggttgagagccgcactgcagcaggaattcagccattcgggagatcccgagcttgtcatcccgccgctttctttatgcacggacaatgcagcgatgattgcggctgccggaaccgttgcttttgaaaaggggatccggggctcgtacgatatgaacggacagcccggtttggaattaacatcctttgatcgtctcacgttgtaaaacgtgaggcttttttttacttattaacagataattctaacatatccacaggattgtgaatatattcagaaatccagtctggataagggactgaaagttgttagtaaagtggataaagtcagaaaattttgtggatagtgtgtataaaacgcttacttaaatggctgacaaggaggatagctgtggataaaaaagcaccccttaaagaggtgcttgactttttctattcttctgaggagagttcctcccattctgctaataagttttcgagcttttgattctgggcttcattctccgcgtgaatggtctgtactttttcatgatcctgatacacgtcaggatcgcacagcagctcctcattggcactgattttctcttcggcggatgagacggccgcttcgatttcttcaatgcgtctcaggcgctgccgttctttcttcttccattctttttcttcctcgtaagttcttttcgtatcctgtttgaccttgccggcaggctgagtctgctccttttcctgccgcttcatttcttccagttccagctgctgtgcttttttctcggtgtaataatcatagtctcccaaatattcttctgcatgatcaggtgacagctccagcactcttgtggcgatcctgttaataaagtagcggtcatgcgatacaaataacagtgttcccgggtagtcgatcagggcgttttccagcacctctttactgtccaggtcaaggtggtttgtcggctcatcaaggatgagaaagtttgctttttgaagcatcagcttggcaagcgcgactcttgctttctccccgccgcttaacgaacggaccggtttcaggacatcgtctccgctgaacagaaagttgccgaggcatgttctgatttctttttccggcatgtccggatattcatcccacagctcgtccagcacgcgtttggacgatgtcagttcagcctgctcctgatcgtaatagccgattgtgacattggaaccgtacgtgatcgacccggattccggactgattgtattcataatcgttttcagcaaggttgatttgccgattccgttcggtccgacgagggcggcgctttcgcctcttgtaatgccgaaggtcaggtttttcaagagcggcggctggccgtcatagctgatggaaagatcctgtacgcgcaggacgtcgtttccgctctgttttgtaatgtcaaaacggaaggcggcggatttctcatccccgagcggctttgccatgacgtccatccgttcaagctgttttcgtctgctttgggctcttttcgttgtagaagctctggccagattgcggtcgacaaaatcttgaagcttggcgatttcgtcctgctgtttttcatacagcttcaggtctttctcatactgctcagctttttgttctaaataggcgctgtagttgccgaggtattttttgctttctgtccgtgagacctcgtacacttggctgacgactttatcaagaaagtatctgtcgtgggaaacgatcaggattgcgcctgaatatccctgtaaataatgctcaagccatgtaagcgtatcgatgtcgagatggttcgtcggttcatccagaataagcagatcaggctgggtcagcagcagttttccgagcgcaagccttgttttctgaccgccgctcaggctttgcactttcacggaatcgtcaaattttccgaagccgagtccgtgaaggatagatcggacgtccgcttcatattgatagccgcctttatccttgaaatcctgctgaagcctgtcataggttttcatcagcgtttcaagctccgcgggggcggccgtggccatcttttcttcaatagagcgcatctctttttccattgctttcaggaaatcaaaaacgctcagcagttcttcttttatggtaagctgggattccaagcctgtgtgctgggcaagatatcccatcgttaattctttcggtttgattaattcacccttttcatatgaaaggtgacctgcgataattttaaggagagttgatttgccggctccgtttctgcctactatggcgatgcgatcccgagatctgacttcaagctttatattgtttaaaataggatcagcgccaaaagatttggatagctgattaatttgtaagatcatcatattatttcacctctgttataataagttaagtgtagcttatcaacctgctgtcagcaaacaatacatcagaattggaacattataggataagacatcagggagaaaatagtgtatgatcagaagtaaggagagtttaaatatgaatggattttctcattttaatgaagaaggccgtgcccgcatggtggatataagcgataaatcttcaacagtccgtactgccgctgcgatatccagcgtacacatgaagcatgacgtgtacagcagaatcaaaaaccgcgagatcggaaaaggagacgtgctggctgtcgcacaggtggcaggaattatggccgcaaagcagacgtcagcgattatcccgatgtgccacccgctttctttaagcagcgtcgacatttcattcggctgggaggaaaaggattccgaagccgttcttcatatacaggcaagcgtaaaaacgaaagggagtacaggtgtggaaatggaagcgctaacttccgcttcagtctgcgctttgaccgtgtatgacatgtgcaaggcgctggataaaggaatggtcatcggcccgacctgcctcatggaaaaaacaggaggcaaaaacggtgattttaaaagagatgcatctgagtataaagtggaggaccaatcatgaacaaggatcaatcaaaaattccacaggcgacggcaaaacggctgccgctttattatcgctttttaaagaatttacacgcgtcaggaaagcagcgcgtttcatcggctgaactgagcgatgcggtaaaagtcgattcggccacgatccgccgggatttttcctatttcggggcgctcggcaaaaaaggatacggctataatgtggattacctgctgtcatttttcagaaaaacactggatcaggatgaaacgacgaacgtcattttgatcggtgtcggaaatttagggacggcgtttcttcactataatttcacaaaaaataataacacaaaaatatctatggcttttgatgtgaatcagagtaaaataggaactgaggtaggcggtgtgcctgtctttgatcttaatgatttagagcttcacataaaggatgaacccgtggcgattcttaccgttccggcggttgccgcccagtcaatcaccgaccggctcgtgtcactcggaatcaagggaatccttaactttacgccggcccgtttgaatgtgccggatcacattcgaattcatcatatagatttagcagtagagcttcaatcattggtttatttcttaaagcattattctgttttggaagaaattgaatagcgaaaggaggagctgcacatgatcggtcctggaagcctggcggttatcggtgtggtggcggtgattattttcggtccgaagaagcttcccgaattaggaaaagcggcgggggacacgcttcgtgaatttaagaacgctactaagggattagccggtgaagaagaggaaaaaaagaaagaagaacagtaagataggatgacgcgtatgagagtgaatcaaatgacgcttgtggagcatattgccgaacttcggaaacgattgctgattgtggcgttatcctttacggttttctttattgccggcttttttctggcaaaacctatcattgtgtatcttcaaaaagccgatgaagtaaaagagctcacccttaatgcttttaacctgacggatccgctgtttatctttttgcagttcgcgtttatcatcggcatcattttgacttcgccgattattctctatcagatttgggcgtttgtcagcccgggtctgtatgagaaggagcgcaaagtaacactcagctatattccgatttcgatcgtgctgtttgtcggcggtgtgtcgttttcttattatattttatttccgctggtcgttgattttatgaagcgggtctcgaatgacctggatgtcaaccaggtaatcgggattaccgagtactttcattttctgctgcagctgacgattccgttcgggctgctgtttcagatgccggtgctgatcatgtttttaacgagactcggtgttatcacgccgaggtttttatcgaagatcaggaagtacgcatattttgtgctgctcgtgatcgccgcgatgattgcgccgcctgagctgctgtctcacttgatgattaccattccgctttgcattttatacgagatcagtatcctgatttcaaaagcggcgtatcggaaaaggcagaccggcagtgaatctgaccaggacgtatcagcataaaaaaagccatttctcaatgatgagaaatggcttttcttttattatttttggtttttcttcactttaaatgagaaggcgaacattttaaacgagatgctgatattataagcggcgaaaaccatcagcagtatggaataaaaagaccacatgcttcccggagagcttgcggccaaatacgtaaagatacagccgactgcgaaataaatcaagccccaagtcattgggttcctcatacaaacaatcctccaataattaattgcatttgctcactatgctgttcaatatatttttgggcggggccgagctgcatgaccacgacaatggtattcatcatgacatgggcgaatatcggcacaataatccgtttcgtctgcacatacaagaacgcaaaggtaaagcccatggccgtatacagcagcaggtgcgtgaggtcttgatgcacaatgccgaaaatgacggaactgatcagtccggcgataaagaaattcgttttttcatataatacaccgaagatgatcttccggaaaatgatttcttcaagaatcggcccgacgatagaagaaacgataatcatgagcggcatggctttaataatgttaagaatggctttcgtgttttcggaaccgctgcccacatgaaagacatactgctcaatcatcccggcgattccctgagaaaataaagcgagccatattcccgcgaccgcccagagaacggacatgccggcggatgctttcttcccgtttcttaatgtctgtttcggcgcggttctcaaaatcaagagaacgataatcaggcagataaaaaagcttacgacggaataaatcccctgagccatggtgagattcgcattcgtagggtgcccgcccgcatagccgaatttgtacattaaaggaatgccgatcaatgcggaaagctgcatgataacatatgtcaaaatgatataccaatactgttttctcaaatgatatgtactcctttatcctataaaatcaacttatttgttcttattgtaacacaagtgaacttgacgtgaaaaaaggagaaaatcagtgcgagagagaatcatgtaagcgtgaaaattttttattcttatgacttgaaattggaagtgagattctttattataataactgtgttagcactctttagagctgagtgctaaaattacatattcatactattgaggaggttattacattgttaaagccattaggtgatcgcgttgtcattgaactcgtagaatctgaagaaaaaactgccagcggaatcgtattaccggattctgcaaaagaaaagccgcaagaaggcaaaatcgtggcagccggttcaggtcgcgtgttggaaagcggagagcgcgttgctttagaagtaaaagagggcgaccgcattatcttctcaaaatacgccggtactgaagtgaaatacgaaggtactgaatacttaatcttacgtgaaagcgacattttagctgtaatcggctaagcaaataaatatttttaaaaattcgaggaggtttcgttaacatggcaaaagatattaagtttagtgaagaagcacgccgcgctatgcttcgcggtgtcgatgcgcttgctgacgctgtaaaagtaactttagggccaaaaggacgtaacgtggttctggagaaaaaattcggttctccgttaattacaaatgacggtgtgacaatcgcaaaagaaattgaacttgaagacgcgtttgaaaacatgggtgcgaagcttgtagctgaagtagccagcaaaacaaacgacgttgccggtgacggtacgacgactgcgactgtacttgcgcaggctatgatccgcgaaggcctgaaaaacgtaactgcgggagctaaccctgtcggcgtacgtaaaggtatggaacaagccgtaaccgtggcaatcgaaaacttaaaagaaatttctaagccgatcgaaggcaaagagtctatcgctcaggttgctgcgatctctgctgctgatgaggaagtcggaagccttatcgctgaagcaatggagcgcgtaggaaacgacggcgtcatcacaatcgaagagtctaaaggcttcacaactgagcttgaagttgtggaaggtatgcaattcgaccgcggatatgcgtctccttacatggtgactgactctgataagatggaagcggttcttgacaatccttacatcttaatcacagacaaaaaaatcacaaacattcaagaaatccttcctgtgcttgagcaagttgtacagcaaggcaaaccattgcttctgatcgctgaagatgttgaaggtgaagctcttgctacactcgttgtcaacaaacttcgcggcacattcaacgctgttgccgttaaagctcctggcttcggtgaccgccgtaaagcaatgcttgaagacatctctgttcttacaggcggagaagtaatcacagaagacttaggccttgacctgaaatctactgaaatcggacaattgggacgcgcttctaaagttgtagtaacgaaagaaaacacaacaatcgtagaaggcgccggcgacactgaaaaaatcgcagctcgcgtcaaccaaatccgcgctcaagtggaagaaacaacttctgaattcgacagagaaaaattacaagagcgtcttgcgaaacttgccggcggcgtagctgtcatcaaagtcggcgctgcgactgaaactgagctgaaagagcgtaaacttcgcatcgaagacgccctcaactcaactcgcgcagctgttgaagaaggtatcgtatccggcggtggtacagcgcttgtcaatgtatacaacaaagtcgctgcagtggaagctgaaggcgatgcgcaaacaggtatcaacatcgtgcttcgcgcgcttgaagagccgatccgtcaaatcgcacacaatgcaggacttgaaggatctgtcatcgttgagcgcctgaaaaatgaaaaaatcggcgtaggcttcaacgctgcaaccggcgaatgggtaaacatgatcgaaaaaggtatcgttgacccgacaaaagttacacgttcagccctgcaaaacgcagcttctgtagcagcaatgctcttaacaactgaagccgttgtcgctgacaaaccggaagaaaacgccggcggcgcaggaatgcctgacatgggcggcatgggcggtatgggcggcatgatgtaatcaaacggaaaaaacccttgatacaccaagggtttgaccgtttttcatcaccccaattaaccgaaaaaataacaaaaaaataacatttctttatgaaatcccgaaattgaggatgtttccaaaagtctgctggactttgtgggaggcatcctctttcatttttttggttacatgagtataaatcttcatcgttgttttcatgtcgtcatgcccaactctttccattacagttggcaagtcaacttttgcctcggccagcatgctgatatacgtgtgtctaaatatatggggagtagcatgttttttaattgatgttttttccagtattctttccattcttacaatgatattttttggtaaaaagggatagccattctcacgagcaaataggaaattaccgtcgtggtattcgcttggatcaatcctggactgtaggcgcaacttcttttgtttggttacatgtgccttcaatatatctattatctgatcgtcgagagtgatagttcgcaccgatccggctgttttcggcggagttaattcataatttctcatattgttatcttcggaatatatggttttagtgatacgcagctcttttgtttcaaaatttatatcaggaagtttgagggcgcacatttcccctgaacgcatgcctgtaaaagcgagcaagtaaaatcgttcaaggtccatttccaaaccatggacttttactgctaagaggaactcttcaagttcttccctttcaagatatttttgctctattttactactttcaatatcttctactgtcattctctttttaggaactacagcgccagccactggattatcttttaaaagcttcacctttacagcgtatttaaaaatcattccggctgtcgtatgcacaccactaatggtggtacgggcatattcttgatcagtgagatcgttgagtattttttgatattttcttcctgttacctgagcgatattgattttagcgatataccggtttaagatgttaatttctttccttcgaatacgcagagttgcttttttctttcctgtgagagcatattcgttcaaccattcggcagcaagcttttcgaaagtcatttttttaacaactgattcatcaatgccatcttcttttaaggcatcaatagcatctctaactctttgttcagcttctttttttgttttgccacgccgcgcaatttgtttgcgtttaccggtaacgggatcacgaggtccgtcaccaacagccagccattttttacccttgatcaattcctctgtatacattttgtcaccccaatttttcaatgaatagttttaaagagctgtttatacatcaagaatgagaactgttttcttgtatacatatcgagccgtttagcagcaaattgatatgtaacattaaaggtatcacctattaattttataacctctgatttcatgcgtggcaacgaaatcttttcaagcataaaactaggtacacagaaatgatacataaagctattagcctgatactcttgcaactggcgaaacatacgattcatgttgaactggtttccgcaatgtttaatcacatgccctagctcatgaacaaagtcttgccactgttcttgcggagaggctcgagcatcaaggacaacgctatactcaccgttaatttgaaacatgcagctttctctttgctcataatgcagccagatacgaaatgccgcggcaatcctttctaaatcaatgtcttcaggagtctcaatatttaatttgtaatagatttttttcacttcttcttcaagatacgataactggattgacattaaaaacaccaccatgtagggaatgtatgttctgtttttggtgtgaaagaaaagcccgaggaagaagggctgtcataaattcaatagctgtttctttttaatttcatattcttcttgagtgatagcatccatatccaacaattctttatattttttcaattcatcagctgcagatacagtaggggcaggagctggtggtattgttggagctggaatagactgatgttcttctatgtatttttgaatttctaaaaccataggcagttcatttgcgccaaaagtgaaggagttatcgtcttgtattgcgtcccagagtccacttgtttcattagcagctggcgttaaaaattgaaaatagcctgaggttactaatccaggtttttttatttgaagcccggacagttcactgattctataagatttctccccactataccctcgtgtgatagtgttaacagcgccttttcttgctactcttatatagtttccatcaagtgtgattgttgtttttgctgatttaaaatagtattctttagtttctttctttaaatcctctttttcactttcgtatctttcctcattgccagagatttttgattcaacatatttgataaagccgtcaatatcaccttctgatattgaattgatgtttaagtcttcttcggctgttttaaaatcaatcttatgtccaattaatggcttgcgactggcagtaattttaattatttctttatagggccaattctttaaaattggttttttctttttcaagacaatgaaatatacttgattttctgtagcaataaaatgcccccatgtcgcgtcactcttcatagttccgcaaacgagttcatgaattgtttcatttctttcatcaatcagaggtttagctgcttcataagttttcaagaaatttttagaagccttcatgcgttttttaaactgacagttatagatttcgccattttccatcaaaaaagacaaatttaatttcccctttataagtaatacacttgagtatatttttttctgatcagatcccgtttgaatccagatgcaatccagatgagaaagaattctatttcccttgatataattggcttcaacctactggtgaaaaattcttttccgatccagttcggttctaatcccgatccaatcctgatcttattagtaaacagaaataacataataacaataatataaataaaggtttcggcagttagttactttttaggcttacggccttcacgttcttctttctctttgaggtactttataaaatcaattgcttgtttttgtctttcttctgagaagtcactcgcttctctaaaggcgatctgtagatcaggatcatcaaaaaggtcattattaaaagtaggttctttgccagttaggagataatcagttgttacaccatacaaacttgcaagtctaacgagcatttctccatctggtttccttaaaccgtattcccagttcgcatatgtagacattgttttaatacctaatttttttgcgacgaaagatttgctccagcctttcttttctcttaattcagttaagattttccctgttatattatccattattatacacctttttttatttggtgtgtaaattttaacacggtttacacacaagagataattacttacacaaaaagaataaaaatatgttgacttacccttattgtgtatattattatgtatttaacgagttacacgaaaagagtaaggtggtgagttaatagtgctagaaaaattacgggctacaagactttctcaaggaaagacccaaacttttatggcaaaaaagcttggctatagatacgcaagcggttatgcaaatatagaaatggggcgtacaaagccaagtcttgaaaaagcacaccaaatatccgagttactgaatgaagaagtcgatgagcttttttttaatgaaaagttacacaaaaagggtaacgagaaaactgcttaggaatgaaagttacaaaaaaacagtataggaggtcgaagttatggatcaaaaaaagctggaacaaattaaaaatttgttgaatggtatgtcccaatccgagtggagccgtgttaaacaacatgtcgatgtactgttcagttctaaagccgccaaattgcagtttgacgacccagaactgttagaagctaaccttaaacgtgaatttaggatgaatacttgatttggataaacattgggtgaatgcgatattcagcatttttgtaataaatattaacgtaatcttgctgatacatcgtgtgctcttctttagaattagggctccaaattgaagcaccttcttcccaccatatgtatggagaagacatagattcacctattttgcagtccggatcactagtcaagtcaacccattcaccacaaaggcaagcgtaaaccttagtagaagccattaaatctcaccaccttccatgcatattttaccacatgaaagtgagagattataaagctcattgtaaaggaggttttttatatgttcactatgcaatacgatgagaaattcattgaacagatagctgccaaaattgctgatagagcaacagacatgctggtagagcggctcagctctttgaacgagcttcctcacatcttgacgagaactgaagcgatggaggtgctgcggtgcggtcccactaaaatggcggaactgatggcccgtccggattttccggttaacgaagaatgtggcaaaaaaatccctacgactttgctttttaaatggattgagagcaacacgcgttgggttgctgagaacaccgcatactatcagaaaggagcttcggcatgaataatttacaaacattcaaaaatgaaattttcgaagttgcagccaaaattgagaatgatcaaatcctttttgatgccgagcaagttgctcggaacttaggcctcactaccgttgccaaaagtggcaacgtaacaatccgatggagccgtgtgaatacttaccttccggataactttccagaagtagagaaaggtgattttattcctgaaccattggtgtacaagctggcttttagagcatctaatcaaattgccgaacaatttcaagattggttagcctttgaagttatacccacaatcagaaaaaccgggggatatgtcgcaaatgatgaacagttcattcagacgtatttgtccaacgcagacgaaaataccaaattatttttcaaaacaactcttcacgcactaaaggagcaaaataagcaaattgaatctatgaagccaaaagctcttttcgccgaagccgtggaagcatctgaatcatctgtgcttgttggcgagttagcgaaaatcattcaacagaacggcgtaaagattggacctaacaagttatttcaatggctccgtgataatggttatttaattcgtaagacaggcgagtctttcaatctaccaacacagcgaagtatggatttgggtctctttgaaattaagaagagaacaatgaataaccctgatggttcaattagaactacccgaacgccaaaggttacgggaaaaggtcagatttattttgtgaataaattcatttcatcagaaacagcttgaaacaatctccacaaatttggggagattaatgttcgagaaaaggactagcttgtcccttcattaattaaattttaccagtgaacaactggatatatcaggaggcaaacatatggagaacaacccatacaatttgcataatctaccccggatcatgcgtagtgtccgcaaagcggcaggacttgcacagtatcagatcggtaatttgatagggggaaaggatcagcgatatgtttcggacgttgaaaatggattcagtaagcttaccccggaattatgcattaagtggtttgaggcgtgcgaggcatacgaacatattgatctggtacattatctcttcaaattgcacccgacgacggcggcgccaattgatccagcacttaacgagagtgcaagcgcggcggtaatcaatatgattcaccagcttgaagaagcattacaagcaacaaggcatttagcgcgctggttggcaaacgataggccaggccgacaacctgaagaactgcccatggccgatataaagcagatttttgatctgatcccagcaaataaaacgctgatatattcgctggcccgtagtcatggactgaacatgaaggaactggccgaaaggtggacgcggaaagcgctaatgagtcaggttgcaatggcgaaaacagaagaaaggcaggcggtgctggtatgaaaatcaatcagtttcttaaagcagatgcagattcagcaaaaaggaaaatcgagtcggcggaaaggctctctatcatgcttgcggaggcgttgcgggatggcgattatgaagaagctatcagtcttgcagggagcatcaaggttcttacagaggatataaaccggctgacgaataaagggcgcttacatcaaactgtcttaaatatggcggcccgcgggattcacctgagtgttgtaagtaggtgttcacaatgaatattgaaaatccgatggtcttgaacaactggcatgacaaactgactgagccggacacgcaaaaggattactttggggatgaagtaacggctttcgatgattacgtgatagatagtgctgagggtgaaatcatcttgagggaaaaccttgagcggtatctgaaggagcatcttggttttgaatttaaaaatgagcaataaaaaagcccacttggcagagtggactaggtaaggcgttttgataattgattgtattcctattataccaaaacgccccataaaaaacaatggaggttttatacatggctaaagcagttaaagtggcattcagtgagcgtgcggaggatcagcgacgtttaaggcaggtcggcggctcaattgtattctccaaaaacggtaaagcgcagtttagtttcccttcaatggatcactatcgggaatggcagcggcttggaacggaagcatataaaagaaaggtggcagaagcacaatgaatggattatcacaggtggattactcagattacatgccggcgccccagcaggctactggcgtgactatggaagcgatggtaagccgacaggctcaagaagtacaagcggcaatggttatcgcaaagaaattcccacgggacgtatacgcggcttttgaccggattaaaaaagcatgcgagcggaggctattggctgagaatgcggtatatgaatatccgcgcggcggcacaaaggtttccggcccatccatccggctggctgaggccttggcacagaactgggggaacattgattacggaattatggagttggaacaaaaggccggtgaatcatctgtcatggcttacgcttgggatcttgaaacgaatacccggcaaaccaaaattttcactgtgaagcatgaacggaaggcacggggcgccattaccaaacttgatgatccaagggatatttacgaaatggttgccaatcaaggagcccgccgggttcgtgcttgcatacttggagtgattccgggcgacatcgttgatgcggcggtagatatgtgtcaaaaaacattgattagtggacataaggaaccactggaagaccgactcagaagtgccttctccctttttaaaaaagagtttggcatcactaaggaaatgattcaggagtacatcggcagtaatgttgatgccttcactgagcaagatttcctgaaaattggtcgtatttacacggccctgcgtgatgggatggcaaagaaagaggattacttcaatgtgaaggccactagcgcgactaaatcaaaggctgaagaagaattcaaaaagctgaaagagcaagctgacaagcctgctgatagtaaagaaaaggcgggtgatcctgctaatgcggataccggcgctgaacaagaagaattattactctaacgagattgatagacactacatgtcaaattctcaatataaaagctttttgcaatgcgaggctgccacgatggcaaagttgaacggagaatggacgccgcccacatcggaggcgctcctcttcggccaatacgttcatgcctggcttgagggtgaacaggcttttgatgaatttaaaaagaacaccccatcactttttacacaaaagggccagctgtacaagcagtatcagttagctgatctgatgattgaggcgattcaaaatgatgatctctgtatgtttgttcttcaaggagaaaaggaagtcatcgtaactgctgaattgttcggtgttccgtggaaaggaaagctggacgtatacaacccagctggcggccgtttctccgatctgaaaacagcgcggtcattgcgggagaaagtttgggacccggaaataggatattgctcttttgttgaggcatacggatacatcgctcagatggcgctttacgcagagattgaaaaacggatgactggacggagcgaatggcttgagcccctgatcgtaggggtttcaaaagaagatccacctgataaagctgtcatcaatattgatgagggcaggctggaaatagagcttgaagagattgagcagcggatggatcggattttgcaagtgaaacacggcggagagaaaccagagcgatgcgaaaaatgcaagtattgccgggccactaatcaactgaacagcatcatccatttttcggagttggtgagctgatggaaagggagctgatcaggattcctatcccgcattgttatctctggctggtcaaaacggttcagcgcgacttgagaaaggacttgtatacccggtacacgactgactacttaaagacaaatgagccgtctctgagattagtagaagtagatttcaaggctctgacagcactgtgtgaaaggaagtaggtgagcggcatggatatgcaaggtttggggtatgtggtcctgccccggctgccatttaaagattcacgagacgagacaatatacgattatttattcaaacgggcggagtacagggcagatcaagaactaaagctcgggcagacaatcattaagcttgtagatttagccaagcgcttcaactggtcttctgatcagatcaaatactcgttagatcggatggtaaagcaagagtatttgaagctggaccggctgccgcaaaaacgcggtttcattgtgacggtgttgaattatgccgagtacatacagcttggaaattacaacaagaagatagacccggctccaatacctttaggacagcaggaggttgacgaaaaaatgaaaaacgcatttgaactattcgaaaacaaaacagcccgcaccattggcacgatggaggttcagcggctcggatatatggtggatgattacggtgaagagaaagtcatggaggcaatgaaacaggctttcagattcaagggcaacaacgtcaatctgaattacattgaagccatcctctcaaacccattcagccagagacgaaaggagaaacagcagtatggaagctcgcaaaacgcaagatatggacgcggcaatgaaggcaattctaaccaagctccgggatcggtcagcagcatcttcaacgggacaggccgcctcagaagaaaaggctgaatacgagtgctctgactgcaaggataagggcattattgtttaccgtattcaccaagacaccgagcgccaattgagaaaagagcataagacaatggaaagcctggcccctgatcaaatggtcagagaagaggattatcttgcggggaaagtatgcttgccggataaggcccgagaatggaaaaccacattttccaagcaatgcgagtgtgtgaagcggaaaaagatcgcccggcttatgaaggccagcggcatcacggaggaattcgaaaagctcctttttggaaacttcattaaggacgggaagccggatatgatcaaggacgcttatgagtgcgcggtggaatactataaggattttcagagcatcaagggaaaacgttcaaacagtatcgctttgctcgggcagccgggcagcggaaaaacgcacttgttaacggcgatcatgaacaacctgattaagaaaaaatcaatttactgcatgtatttcccgtacgttgagggaatgggcgatctgcgaaatgactttgatcagctggaaacaaagctcgacgctatgcggaaagctgaagttctgttcattgatgacttattcaaaccagtaaagggggagccgcgggcgacggattggcaagtggaacaaattcaatcggttgtgaattatcggtacctgaatcataagcctctgctaatctcttccgagcttgatacgggggaaattttggacatagacgaggcgctgggctcccgcattcatcaaatgtgcagagattacacagtgaccatcaagggcgatcggatgcaattaaaccataggttaggagattgggaatgacggaaaaagcgaacttcacagcaaccggcggcatgtacgtgttcgggcctgctgagcaaacggccggccaggaccttaccccggcgatccgggtgcttgaggaaaaaatcaaacaaatggagctgatgcacagtgcttaaagcggttatactgctgccggccatcatcctcacagcgccgtacaaggaaaagcagattcagcactgggaacaaattgacgggaggtaatgacggttggattccattcagtttatagtttacggcgagcctgttgcacagggaaggccgaggggatctgttataaatggcaaggttaaaatgcgtgatcctttgaaatcaaagaattttaaacaatatgttgcgctggtggcgtcacagtatcggccaaaacaagttattacgggacctgtggcaatggatgtcagagtattcagaccaatgacgaaagaaatttctaattccaagacaaaaagagaaaatgcggaaaagggtctcctgcgtcccgtaacaaagccggacgttgacaactatgtaaagggagttaaagacgccctgaatcatctgatttaccgggatgatagccaggtagtcgatctgaaagttagcaagttttacagtgaagagccccgggtggaagtcattataacggaaatcctgccataacgctttgtggagaaagtttgatgcttgagaactaaatcaattcaggaggttatcgctatgcaagaagaaatcaaccgatacaagcctggtccagttaagaagtggaaaatgacgccggagcaattggcagcttacatcgaaaagcatccgatcatttaccgcgaggaattaaaaccatctgccggagtaacgatgcggctgccgtcgtaaaacgtaaaaaagcaccgaagccgtggccccgatgctctgatatgaactggtacttctatcatagcacagggggcggccagagtgaacaagccgacagaaataaaaaatcatgaaacaactattcagcaaagcatcgagccggggaaagtccgcatcatcgttttagatggcactgaagggactgctcatctaatggacgccccggaacacggtaaaacaatcattcaaacaataaaaggcggcctggctcgttgtgattacgagatcggccataaattcaattagcaggggttttcccctgcgggggaggaacggaaaatgtatcaaaacgaaattgcccgcaagtgtgaacgctgcggaaaaatatattattcagctcaatgggttgtatgcaaaacatgtcttttagaccgggaggcccgggcatgaaagaattcaaaatcaacttgtcaaaaggtgaggttttatataccggctcttacatttgcaccctttcgaaaacggcggccagtacaccggagcaaatatctttagaagcagcagccgaaaagctcgcggaagagttaatcatgcaacaggctatgaatcgggagcaccagcgccagcaggatgtcacggtcattcagtttcggcaggctcaggaagatattaagttgctacaggcggagaacaagcgttatagaaacgcattagaattttacgccaatgaaacgacgtatacaaacgaatttgaagactgtccgcctgctgtcgaactcgacggagggcaaacggccagaaaagcattggagggggctgcggaatgaataacataaaaatccgatacgtattccgacataaggaaacaggcaatgttgaattgaaaacgtactatatcagtcagcttgaagaacgcccggcgcgcaaactgtctcccgtcttttgtgaagagtttggttacgagttgatcagccgcgatttatggacgggcaaaaagcttatggaaaaagaaatatatgcgggagatattatctgttataaatcacacggccgggtgtttaatctagtcgttaaatggtcagaagatgatgccggattttatgcgggtggaatacgttgggattttgttcaaatgtatggtgagttaatcggcaacgtacatcagaatcccgaaatgttaggcggtgctgcaaaatgatgccattacaagtcgaactacaacggaacgtgaaggccacgaaggacgaagcgatgaccgtcgagcaggcggccgagcttttaaaggttcacccggattacatcccgacgctggtcgctcggtctgacgatctgaaaatgatcggtgaccataccattatcgctaaacgggataaaacaaatatctggctggtcggggcatgcgtggggcttttcttcttcgctatctccgtgctgccgaatttgatcgggggttaagggatggcacgctcaccgttaatctggtttggcggcaaaggtcgatacgccgatcacatcataaataaaatgcccgcccataaggtgtacgtcgagcctttcggcggcgcggctcatgtcatagcgaataagccgcaaatgggacatgaagtgtataacgacattgacggccatgtggtgaatttcttgatgcaagtcagaaaggatccaaaggccatgcagcaggcttgcgaatccattccgtacagccgggcgctctatgagaaatggaaaactgaagattacccgcaaaatgattttgaccgggctgtcaggtggttttatatgaatcgctccggcattagtaaggggaacgtggaggaagtgccgcagacaggctggaggcatagcacacaaagcgggcagaaccctgctggcggatacataagcgcctgcgctgccttcgagtctttcgccaaccgtatgaagggcgtcatgatcgaatgtaaggattttcgtaacatcatcgagaaatacgatagcccggatactttgttttatgtggatccgccatatgttgggcgtgaacggttttatgctggcggctttaacgaagaggatcatcgggaactggcccggctgcttaatcaggtcaaagggaaagtggttctttcttattacgatgatcctttgatactcgagatctacccgaactgggagtcagaaaccttttccgcatacaaacaggttgtcggcggatccggaaaaagccgcggggctgaagaattattgctatttaactataaaatcacacaactcagcttatttgatcaggagggaacccaatgccaacagcagagcaattgaaacgaatgaacgacataaacgatttgatcaagcttatcgcaagcattgatcatcgtacattctaccgcaagtcaaaggatcgcatagcgtatttcagatttaagaaaaaactgttcttcgttgatgattacacgggcgctgatgtttacccgtatgaattgggatacggcagttcaaacggcttttcgcatgggggcaacatgtggcaactggtcaacagcttcagaaaattcatcataacagggaaatgcggcgagctgagggattataaagaaatatgggcttacagctatgaaggatgtatgaaaatccgtcagaaggcgaaggagattggtttcattgaaagtgttgattacccctacagctttgatgaatgggcggatagtaaatgatcgaatatcattgcccggactgagattataaaaaacttgatttagaaatccgcgcagatgcccgctgcccgcattgtgggcgctgcataggtggtgaagtggaaaatagaagagcatattagaatgctcttctattagaaaattaatagacaaatacgtgtaactgaccgtatactgatccatttttgaatatagttaaatatgcatttccagctttattgccacggacaagcccattggtatctactgtgaaaacagcgctattatctgaatgataagcgaatcctgatcctaaatatttggcatctaattgtttagaacccccggctctcacttcaaaggtatcgtaataggctttaattggaccaggagatatagttgtttgcgtttcatttttttgaggagttatctccttagcggaagccataccactaatggaaaaagctaatacaggaatcgctagtgcagtaacagcagtctttttgaaattcattttaaacactccttaggttttttattgaacacagtaataattcgagcaaaataatgattatccttgtaaataaatgttaattatttgtgaactaggaaggggaaaataatgaaaaaactattcaaatcaatcattctatcagctgtattacttatgggagccgcggccgttgcgccgtctgcttccgcagcatggtccggctggcaaaatgaatccgggtacagcggccgggtgtttacggatgccgcgacttacacggccggcgcctcaacggtggactggaaagccgagaaaaaaggctcaagcactctttattacacggccggcgtatacaagaagcgtagcggcggcgggcttactgaaacgaatctggtacagcgaggcagcttcaaaacggcaacgcctctgaaatcattcaacgtgaaaacgatccggaataagaccgggaaagggacctatgtcattcagctggactgctactctgattccggcaagtggaactatatcggaacatttgaatcagcaaaatttcaaatcaaataagggggattcgatggcgctgagaatagtttttatgctgatggggttaggtttctggttttatttccagtacgaatacaggccggacatgaaagcaaacatcacgttaataggcgcaatcatcgcattcacggccgcggcgttttttcaagatattgataagtatatagagaagagggaagacaaatgaacggattttctgagattgaacttcaaatgattgttgatgaattaaaaaagggtatgcctttacaactgcagcttgttagccatacgtcaaagctgattgtggcttactatcaggaatacaagaagaatccatatgtggagccggcggacgtggtgcctctagctgttaaatccggaatgaatcaaatgggtcttaattaggaggagagagatgttaatagcctttaaaatagctctcttgctggtcctgatagtctctcttatgggagttataggagaggataaggattcacagctaagaaatcacttaactgcaatttgtatagtagcgatcatcgggaacattgctacatatgtgctgctttaactgaataagtccaagacggaaagcctgcggacactgatcattgcacagaatcactgtgctctgattggtgtccgttttttatttgaacggagggatgacatgaagcagaaaaagaaaaagcccaataaaaacatgcaggagcgctcagatcgtttctggcaacaaatgatgaacacaaacatgcaaacacttaaacgaggcaagggcggcgcatttaagcgcaaataaagggaggaatcagaatgcaagatttaatcattgagtacaaacgagctttaagagaaacaagaaaaatgtatcggctctacaaagatacggctgaagtcaatctgacggctgaacagatcaacgacaaaaagattatcagtagcatgatcagcgatattgaattcactcttgaatggctgcagaacggaagacagccgggcgcacgccgaggtgctgacagaagagacgcatatcaaaggacgattcttgctgaacctcgcttaattgatgcgctgccggaagaatacgcaatcgttcaagaagctgagggagaagtaagtgattgggataaggaaagaatcgctgatgccctatccgtgcttaccgaaagagaaaaagacattttcatgatgcatgctgtacaaaacatgtcattcgaagagatagcgcagttattggggattaaaaaaggaactgtgcagaagaacatcgaacgttcccgcctgaaaatgaaaaatagagcagatcacagcctattctgtttagcgtgaataggctcttttttattggagaaataatgaaaaaagcccactaaattacttgacgtgagtaaataaacgatgtataattaatgtatagaaaggagggaaagaaagtggctgaaatcgcattggtactggggattatcctcacaactctcacagttgttgagaaagtcctcatcatcagggaaaagcttaaagcaaaaaagcccaaaatcaaaaaacgcagacgtccaagaaagcgcagatgattttgagccgagggagaaggtagcgcttctcccttgctccaagtatagcaaatgcggcgactaaagaaaaatacttgaaagccagccactttcaaaaaaatgaaaagtgtacagtccactactgatattgttgttcttctcgccctggcgtatatgctgtttttccgtcaggatgtggcagcgggaccgttgaaaacggctctcgacattagtctgatcattttatttgttgtttcgatcatcgagaaagcattttccctttacttgaaatatcgtgagaaaaaaggatgattcaaaaatgtacaagcctaaagagcgtgacgcaatcaagaaattcctgaatgaagagatactcaatacaagtgaggcgcttgagatattggggttcacccgtcagtatctgaaccagttagtaaagaccggggaattagagccgatgaaagaaatgccccgggacaggctttttctgaaagaggatattttagatttccaaaaacataggcggaaatgagcaccctgttaaaagggtgtttttttgtcttacggttgccacctatttatgaaaagtgctttcgttcgacaaattttgcaaatagttcctttatcacactccttaaccgataataaggtgggaggtgagaatatgatgccaatggtaaaagaatttaatgattttttagagaaacaagggcatagatcatgggaagatattgaaaaagatatgcaagatgagttgtggcggattggtagaaaatacgatgtgacaggacctacagtattccatgagtatatggattggaaggcaagtaaacagaagaaaaaaggataggtttcattaagttacttttgttcatattatattattcagattaattctagaagtggtgagagaaatatggatttgaaaagaatagaaaaatcaattgttcatttaaaatgttacagtgaagataaacaagactttggtactgctctttatgtgaaaaaaggtaataagcaatatcttattactgtgaagcatctaattgtgaatagaaattcaggaaagctccatgaatctataaacaaagcaaacaaatatgctgagaatctcaaaactgtaggggtcgatcaaatatatcgattaggatctggtgagtctggagaggcgcctgtagtttatgaaaataatcactttgagatggacttggctattatatcacttaattttaatgagacaattgaatttaagagaaatttagaatcatccgattatacacctttggattttaaacacatttctgataaaaagttaacgccaggagatgatctatgtttgatagggtatcctgacttttctgatttaggtgtcgtcaatcctatgttaacaaatcagcatcttcctatttattcatttggcaaagtgtctttgttccataaccatttaaactattttatgggcaatatgtttagttatggaggttttagcggcggccccattatttataataataaggtggttggtattaatacagctcaaatagtaaactatataaattgtgagaaagaggagcaaccagttattaagtatccaatgaattatataattaaggctgatattatattttcgcttatgaaagaaatagaatcaaatgaaagccagcacctgcacctttaagggtgctttttttgttccttgtaaaccggttccggtaagtctcaggaaaactataggtggttaacggtctgagtgcggcgtcggtttagagggaatatattttccaaaacaaacacgaatcagaaggggcggcggtgaatgtagatggttgaaaagcacattcaggcgtataaggattacgtcaaaggcgtgaaatacaaggaccttgccgaaaaatacggggtgtcagtgaacaccatcaaatcgtggaagcagcggcatggttgggaaaggaaaaagggtgcacccaccgaaaaaagtgtgcacacaaaaataggcgggcaacccggcaacaaaaacgcattaggaaatagcggcggggcggctccggcaagaaatcaaaatgctgtatcacatgggttcttctcaaagtatctgccggaagaaacgcttgaaatcatggaagagattcaggagcgttcccctgctgatatgatatgggatcagattcagatacaatatgcggctattattcgggcgcagcgcattatgtttgtgcagaataaagatgatacggcaaaagagcttaaaaaggcaaaatacgcttatcatcaagatgaggacgaagatggcaatctaacatatgaaaaaaacattgtagaagaagaacttgaaatacagttcgcttgggatcgtcatgcgactctcttaaacgctcaatctcgggcaatgggggagctccggagcttgatcaagcaatttgaccagctggcgcatgagcaagatgagcggcgtcttaaattggaacagatgcgcttgaatatcgagaaaacgaagaagaccgttaatggcggcgatggaaacacccaagaaaatgatattgctgcaatgttgagaaaaatggtgaatgccgatggaactgaataaaaagcaaaaggaagtttgggacagctttattaaagagcaacccaaaattctaatttgtagcggcgcaaagagggcaggaaaaacattcgtgctccttttgacgttccttgctcacgtcagtaagtatcaaaatatgggtttatccttcatcatcggcggggctactcaggcagccataaaacgaaatgtcttgaacgatatggaactgattctgggtaaagaattgaggctcgacaagtcgaatgccgttgaaatattcggcaaccgtgtatattgctttgatggagccaatgctgattcatggaaaaaagcgcgggggttcacatcagccggcgcattcctaaacgaagcgactgccctgcacgattcattcgtgaaagaagtcatttcccggtgctcgtataaaggcgctgtggtcatgatggatacaaatcccgaaaacccgatgcacaccgtcaaaacggattatatcgacaaagacgggcaaatgctgaaaagcgggcggctgaacatcaggtcatttcatttctcgctgttcgacaacaattttctcgatccggaatatgtggagagcatcgtggcatcaacgccgagcggcatgtttacagatcgggatatacacggttattgggtggcgccagaaggagtcatatacaaggatttcaataaggacatccactatatcagctctgaggaattggaaaacaggcgcgtcaatttcaagaagtattttgcgggcgttgactggggatatgagcacccgggttctattgttgtaatcggacaagatgaccaggggtgtttttatttgctcgaagaatatgccaagcaacatgaggaaattcattactgggtgaaggtagcgaaaggcgtaaaagagcggtacggaaacattaatttctattgtgatacggcacgaccagaacacgttgttcgtttccggcgtgaaaaacttcgggctattaacgctgataaagctgtcgtatccggtatagaagaagtagcgcggctgttcaaacaagaacagctttttgttgttgaagacaaagttgaccggttcaaaaaagaaatctttatgtacgtctggaatcagaagacaggcgaaccggttaaggaatgggacgacgtgctggactcactccggtacgctctgtattcgcataataaaccgaaaagacggagaggggtgagctgatgaatcattttatagacatgattgaacagtccggcataacgcctgaattgattgacaagatcattcaggaacataagccggatcatgacagaatgaaaaagctttatgaacggtacgaggctgaggttcaaggcgttccgatcttatccagagaagccattgaatacgaagattttgaaacaggaaaattaaaacgtattgatcacaaagtaaacaataggcttaacaactcgtttgactctgaaatcattgatacaaaggtgggctatttgttcggccaccctattgcatatgagtttgatgagagcgatacgacaagcactgcaatacctgtaaaacagttgatcgaaaattttaatatggaaaataacattgctgatgaagacagcgagtgggggaaaatggcctctatttgcggttacggcgcccgcctcgcttacgttgatcgttctggaaacgagcgtataaaaaatattgatccatgggaatgcgcctttattactgatggaagtatccatgaacctgcttatgctttgcgatattacacggtgtacggcggaaagatcaaagcagaattctatgatcagaaatatgtctattatttcagtacgaaagacagctcagccttcacttttgataaaaaaacattgcatctttttgatggctgccccttattcggtttagcgaataacaaggaactaaagggagatgctgaaaaggttctttcgttaattgatgcgtatgaccgcacgttgtccgatgcatcgaatgagattgagcaatatcggctggcatacctgattttaaaagggttgggcgctgatgaagagacgcttgaccagctcaaaaagaccggagtccttgaattgcttgacgaaaaagatgacgtaagctatctgacaaaggatataaacgatgccatcatagaaaaccatcttgataggttggaagagaatatccttcgctttgcaaaatcggtcaatttctccgatgaatcttttggtgggaatgtttcaggggttgcgatgaaatataaattgatgtcgcttgaaaacaaatgcatcacgatggagcggaaaatgactgctgctctgcgttatcaatacaaactgatcttttccgcatggggcactaaaaggaaagcggcagcggaagattataaaaaagtttggttcggatttaagcgaaaccttccggcaaatgtactggaagaagcacaaacgacagggcaacttaaaggaatggtaagcgaagaaactcgcctatctctgctgtcgtttgttgatgatgtccagtatgagctgaagaagatggaagaggaagaagaggaatacaggctcaacatgccgccgttaacggatgtggaaacagacgcgggcggtgatgaagatgaaccagaatgatattgataagtacctggacgacatgatcactgaggatgctcagaagattgatgtcgtttttgcgtctcgcttaaaggagatcaacgcacaaattgcccggctgtatgcgaagtacagcaaggacggccagcttactttagccgatgccaacaaatacaatcgtctgaacaaggaaatggagaggatggccgaggaatctcacaaggctttcaaaaccattctgactattgttgaggcattagcagccaagcagtttttagagaattatatgcgttctgcttatctatttgaaatggaatccgtggttaacttgggttttagcatcccgacagccgaagtcattcggcaggccattctaaaccctatagctgaattgactttgtcagctatttacaggcggcatcgagacgattatgtccggcagattcaaatttccgtcgcacagggcctacaagcgggggaggattattccaagatcgcccgccgcattgaaagagcgaccgaatttgcccgcaggaaagcccgtgacgtggcgagaacagaagctcatagggtacaagtctcggcgaggatggaaagcgctgagaaggcctcaaaacggagcaaccttaaaaagatgtggaatgctactcttgatcttaaaacacgagccgggcacaggaaactggacgggaagacaatagaacgcaatgggctgttcaaatcaatttacggcggagtcgggccggctccggggcacatgaataatgcgaaagatgacataaattgccgttgtacgattgcttttaaagtaaacggtgtgctgccggatacgagaagggcgagggaaggcggcagtggggcaggccaaacaattccataccaaacctatgaagagtggtacaaatccattgaggaaaagggaagacgttaaacagcggctttttattttgtcctgagcatgacgttaaaaggcttatttttcatgcactcataacaggcgcgcactgtagagggcgaaggaggaagaagcgtaatgccaactttagaagatgtgaaaaaatttctcgaagaaaataaagaaaacgaagatgtaaaggcgtatctgaatgaactttctgccgtgtctgctgacaaggtgaatgggtttttagatacagaagaaggaaaacgtctcattcagcctcggttggattctcattttacaaaaggtcttgatacgtggaaggcgaacaacctcgatgctctgattgatgcaaaggtaaaagagctttatccagaagaaacagaagagcagaagcggatcaggaagctcgaaaaggagctggaagatcaaaagacagcggcacaacgtgaaaagcttttaaacaaagctgtttcttatgcttctgaaaagcaactgccggcagatgtagtggaattctttatcggtgaggatgaagaatcaacgatgaagaacctcggagcattcgaagagaagtacaatgctgcacttcaaaaggctattgaatccaagtttcaagagaatggccgtgatgtccagtccggtagcaatgaaccgacaaatcaagatttagacatcagctcgcttgcagctgaagcaagtattagaaaataaggagggctatttttaatgccaacatttaatccaaacaatgcattaatgcaagactcagtaaatgggaaggttccaaccgaacaaggaacgctggttttaaaagagtttatgacccaatctgctgtcacaaaactagcaaaatatgaagaaatgagtaagccggagaaggaattcacgtacttggcttctggaccgggagcttactgggttggagaaggcgagagaatccaaacttctaaggctcaatggttaacagcaaaaatgatttcaaagaaattgggtgtcatcatccctgtttctaaagaattcttgcgctactctgtaacagatttcttcacacaaatgcgccctgctatcgctgaagcctttgcgatcaaatttgatcaggctgcgttattcggtgtagattcaccgtttggaaaaggcgtatctgtatttgaaaaaatcaaggaatctggtaacacaattgcgttaaactcacttggcaatctatatgatgagttaaacggggtcatggctcttgttgaagacgctgacaaagatgtaaacggctttacaacaacacgccgattccgtcaaaagctccgcggcactaaggacggtaacggccttccgatcttcaacgatgcgacaggcggcgccacacaacaagcccttggccttccgatcggatatgtggattctaagtcatgggattacgaaaaagcggcattacttgcggctgactggaattacacacgttacggaatccctcaaggcatggaatacaaaatctcagaggatgcaacattgacaacgattgtcgatgcagacggaaacccgatcaacttgtatgagagagatatggttgctctccgtgtaactcagcaagtcggattcatgacactgaccgatgatgcttttgctgctattacaccagcaacggaggcgtaagcttatggggtacacatctaaaaactatagcactaataacggcgacaaattggtgatcggcggcgagctcgaaataaaagagggtgcgaaggtgactgggttatcgggttctgcgcctgctcctaaaactatcacttcggaaatgatcggcgacggagaagtgaaaaacatcaatatcggtgactgttctgtccaaaatcgtaacatcggcactggtagtgtacaaaatgccaacatcggtgccaaggcagttactttagctaaactcggtgacgatgtgaaagccaaactatctgatttagagaatcggataaaagcactggaaggaggcggcgcgtgatatgaaagcatctaacggttccaaaactattgaatgcactgaaaaggcttttgaggtggtttattctcacattggttttaagagagtggatgaggccaaacaatctaaagagctgaatgaacggccgggtacaaaccttcttgatatgactgaagagcaattgaaaaaggtgaataaggatgaaatcgttgcctttcttaaggagaacgaatatgaatttgatcccaaagcgcctaaagaggaactgatcaaaattgttctcggtgaagtgtaggtgattctatggatgttcaaaccgtaaaaaatatgcttggcataaaaacagacagccacgatacctatctggccgaggtcctacctctgttcatagatcaagcgaaagactggtgcaacaactcattcatggtcaatggagatgaaaaattaccagcaggggtaaagctgtatgtcgcgaaagcgatcgagcataacatgactccttccaacctttcaggccgaagtatgggagatgtctcatattcttatgaaacagagctgccaagcagcattacgaagcttcttgctccatacagaaagctgagagtcatatgatctatgaagaattcccgcatatcgttacatttcagcgttgggaagaggtgccggacggcggcgggggctatgttgaaaaattcactgattatctcacaatagaggcctttgtcggcgggattacgtcccgggaatattatcaggctcagcagcttcagaacccggttgatttcaatgtgtatttcccgtatcgcaatgatattgagaagacaatgcggatcatctacgagaacaaggtgctgactctcaaatcagatccgatcgaccagggcggcatgcatgagattatgaatttgaaatgtcaggttacgggggtgctgaagggcaatggctgaggtcagtggtagatgggtcaggcagatgcaaagagccacaagcgagttcagaagccgggtcatagatgatattaagcaactggtcacagacacggccgagctgatttacagccacgctgttctgaatgctccgaccgccgcaatagacgggggaacttgaaaaattcaattgaaatcgactaccaagagggcggcttacgggccgttatttctgttggtgccgattatgccgtatatgtggaatacggaacagggatttacgcagaggaaggcggcggccggcaaacgccgtgggtttattatgacaccaagcttaatagatgggtggtcacgcggggaatgcgggcacagccgttctggaatccagcggtggacgaaggcatgcggtattttgccagtcaaatgtgatagaaaggagctgtcatcatgcgatctgccctgtggccgttgcaggctgctttatttaagaggttatcaacagacgaagagctgaacgggcgcgtcacgggcgtctttgatgcagtcccgaaagatcagcaaaagccttatgtgacaatgggcgatgatgatgtatccccatttaaaaccaagacatccagcggtgaagaaatcaatgtggttttacactgctggtcaggttacaacggaaaaaaagaagcgatggagattttgagcctcatgcttcaagcgttaacaagcaggcccctaacaatagagggcttttctttatgccgttctgagttgcgcagcatgcaggtgatcaccgatattgacgggtacacgcgtcacggcattctcagaatgcgcttcacaataaacaattgagaggatgaacaaaatggcagatttattgaatggtattgatgaggtttactttgttcaaccgatgaatgctacttcaactgaaggtctgtttatcgcattccaaacagaaggcagtcatacgaaagaacaagatacaaaagatgaatcaacaaagtctggccgaattgttgggtacggccctaaatctgagagcatcgaactgacatactatgctgctgtctctgatccgggtcaaacggcgattgaagatgcttatgacaacgaagagacagttcaggtatggaaagtaaacctgaataaaaacaaaaacgataagcatgattctgaatatggacatgcaatcatcgagaacttagaaaaaagtgcaccgcaagatgggtttattgaggtttcaacaacattgcctgttctcggtaagacccgtaaaggtgaacttgatcctctgcctcaagaattaattgacgagatcagatcttctgccggtgccaaagagttcatgcagtttggcgagaatgccaaaaaaacaactacgccctaatgcgccccaaaatctatcgttcacggctacagctgacagcgtgaccgtgaaatgggatgcggtagatggggcaacttcatataaggtatacaggggagcgagcaagcagctggacgcaactgtcactggcacatcccacaccttgacaggaattgcggccgatacgaaactcacggtcaacgtctctgctgtgaacgatgcgggtgagtcctcaatgactgagattgttacgcaaacacaagcggttacgccctaacgttccccgcaatataactgcgaaaagcgccacttcaaatcaggtgagtttttcatgggatgcggtgaaaggggcgacatcttacaatatttacaggttttatgcaaaaatagcgactgtctcaaagaattcgtacacgtcgaatcctaacctgaagccggacactgcctacatttttaatgtgtcggcagtgaactcggctggggaatcggaacgatcggccaattttacgatacgaacagaaaaggaatcatagggtccgggcttcccgggctcttttttaacatacaaaaataatcggaggttttataaatggcttacttaactatcggagataaagaatacaaatcacgctgcgactttgcttttgacagattggcaaacgaaaaatattccactgcggacgaaaagggcaaaggcggcacaatgaatatttacatgagtctgctcaacgaagaggcttcctatctttctgctttttgggattgtgcactcgcttacttgaagaaagaaaagccatcaactgaggctattgaagaagcaatcatgaaaatcattgatgaagacgagacaggcgacgcaattgacaagatgatcaatgaagcattcacaacactggattcagcgggttttttcaaaggcgtaatccgtcagcgttggaagatgatggagaagatgaacaaagggaagaaaccagctccgaacgaaacaccggaaatggaagcgaaacggttggaggacgaagagaacggcaaggaagtcttgaagatgatgaaagaggcatacaaagagagaacgggatcgactacgaccaaataattacgaactccgcacattggctcggggtttatgatgtggatttaatcatgtcatggactcctaacgagtacaagcttctgctcaaaggagccaagttgcgagaaatagatgaattggagcttatggcaagaaacgccatgtttcatcgttacgccatgaatgagaagcgccccaaagaaacgaaaatgtttgatgcgaagaaggccagacgccaattggagcgcaatatcactggcgataacgacaaatggcgcaagtcagatgtaaacgagctcggcaaacgagccaaaggggttcagcggtttaatgatgcaatccgcaaccactttgcaaaattcggacaaggaatggggtgagggaatgatcgaaagactgacagcaatagttgaagcacagacaagaaaatttaatcgcagtatggatcgtgtcaacgatataatgcgccggatggctgatcatcacacagtcgaggttgacgccgagattgccagctttcaggcaagagtacggcaggcggcgcaacaaatagataactttgttcatcgacatcaacgcacgcgagttgatttagatgcggattcagaccctttaactcgggccatcaattgggcgaagcaaagattaagacagattccccaaactgtcaccacgcaattaatggggaatgtgcggccgttatcttccgcattggcacgcgctaaagcagggctatcggcggtggcgaacagaatcacaacgacgatagacggaaatcccactcctttagggcgtgctgtcgctgttgcgcggtcagccatagcatcagtatctcataacgtaactaccacttttaatgcggccacgtcgcctatcatgcgcggggtttcggctgtccgttcagctttggcttcactgccaaacagaattaccacggtcataaacggaaacacggctgcgcttatgcgctctgtggcaacggcacgcgctgctctggcgtccttgccgagaagagtatggattagtatagaagctcgaattgatcggtttgaaacgtcaatgaacaggcttgccaagatcacaaactcagtttcaacggtcatcggtcattcaattgccggggcattaacgtccctacttcctgcaatctcgccagcccttgcaagtattgtcggagcaatcggctcattgggccctatgctcggagtggcagccggcggagtaatggggttaaccagtgcatttgcaacagcgggaacaggcgcggcggcattcggcgcccttgctattacttcgataagcggtgtattcaaagcatccgaagacctttccaagctacaggagaagctggacaatgcaacaagcgcaaaagagcgcgctaaaatcatgaaacagatcaataatctgcaaaaatctcttggaaaagaagagagagaggcattaaagaacctcgaagactttaaagacaactggcgggacatcggtacgatggttcaaaagccgatcttaaaaacattcggtatgtctcttaatacgttcaaactcgcgcttaactcactgattccaatgtttgacgggctggcgaaagagggcgtgggactggcaaaaagcatggacaaggctttcaaggctccggacatgcagagattcatttcctatctgaacaaagaagctccgaaggcgtttgcttcattcggccgatctgccgggaatgtcttgcggacagttttcaatctcatcgtagcattcggaccgaccggaaagagcatgacaaagtctatcgaaggaatgacgcaatcatgggtgaaatggtcagcgaacttaggctcctcaaagaaattccaggctttcgtggagtatacaaaaaccaacggcccaaaattgttgcagattatcagaaacttttcgggcggcctgacaaagctgtttactggattcgctcctatgtctcaagacatgatgacatccctcgtagacctgaccaagcggttcaatgagtgggctggcagcgttacgaaaacaaaagaatttcaatcgttcattgactatattaaaaccaacggccctacagtatggagcacattggggcagatcgcgaaaactatcatcaacttgcttgttggcatggctccactaggcaaaacgattttggagaatgtaaacgggtttttgaaatttactaatgcggcgatggaagcaaacccggcaatcgggaagttcattgcggcgggtatttcattaatcggtgctttaagagctattgttccggcgatagtagcagtcagtgctgtaacaaatgggcttaaagactttatgactgctgctcgatatattcggagtttcagttctgccgcatccggaattagaatggccggattgatcacccaattaaaatcagcgatagttactatagggcaattcattgcgagatataccgttatggcagcaaaagcaacagctaatgctgtgaaaatggcagcatcatggactgcgatgaaaatcggttcttttataacaatgctgaaaaacggcattaagcagatgggacttttcattgccagaataactgttttagcagcaaaatcagcagcccaagcaacacgtatggcagcggcgtggactgcggcaaaaatcagttcatttgtgtcaatgttggcggcaggaattaagcaaatgatcttatttggtaaacgcttggtcattctggcggctcaagcagcggcaaatgcggcgcgcatggcagcatcatgggtcatcgcaatggggcctatcgggtggattacggcggcggttatagccttagttgttctcattattgccaattgggataaggtcaagcagtacacccttcaagtttggggtgtcatatctcagtggctccaatctgtatgggaaggcattaaaacagcggcaacatcaacatggaacgcaataacgtcgttcttctccactgtttggaatggaattgtttcggctgctaaaaccatttggaacgggctatctgctttttttaagtgggaattcaatctgtacaaaaccattttcacaacagtttggaatgctataaaatcgtttgcctcttctgtctggaatgggattaaaaagactgcgacttcaatatggaacggcattaagaacaccgttacatcaatttggtcaggtctcaaatcggcggctgtcacagcctttacgtatatgcgggcccagatcgttaacaggatcattgcgacgagagataaaatgatcagcatctggaatgcaattaagagtaaagtctcgtccatatggaatgctctgaaaagtgctgcagtgactgctttcacctatatgcgcgcacaaattgtgaatcggattattgcaaccagagacaaaatggtcagtttgtggaacgcgataaaaagcaaagtgacatctgtctggaatgctttaaaaagtgcagctgtaacagccttcaactacatgcgggcgcaaatcgtcaatagaattgtagcgacgagagacagagtaataagcctctggaatacagtgaaaagcaaagtgatgtccatttggaacggcattaaaggcgcggcttctacagcatttagttacatgaaagcgcaaatcgtaaaccgtatccaagcaacaaaagaacgtatcgtcagcatttggaatagtgtcatgaaattttttagaggcatcaacctcaagtccattggccgcaacatcatacaaggcttaataaatggtatcagcggcatggcgggtgcattagcgagcaaagttaaatcaatggcaaacgcaattcctaacggcatgaaaaagcttctgggaatccattcaccgtcaagggtaatgcgtgaccaggtcggttatcacgtcggcaccggtatggcggcaggtattgataaatcacagggaaaagtaaaagcggctgcggcaaaagcagcgaaagcggctcagaaggcggctgaggtaaaggtatccaacaaaattaagaacgctgaagtgaagtatgacaccaagaaaatgggcgccgatacgtatatcaaaacattgcagaagattcagaagcaaaacaagctgaccagtgagcaaaaccgaaaaatccagcgcgagatatatcaggcatccaaaagcgcctctgataaacagaagaagctactgaaagagcagcagcgcaaggaagcgaaggcgaaactggcgtataccaagaaagtatcagatcagattaagaaagctgaggcaaaatacgatacaggaaaaatcagcgggaatacctatatcaaaacgcttgagaaaatcaagaagaagaacaagctgaattctgaccagcaaataaaggttcaacgggaaatctatcagactcaaaaagctatgactgataaggccagaaagcagaaggaagccgaaaagaaagcggctgacaaacttaacaagggcattctttctgcaaacaatacttatctctcaaaattcaaaaaagtgaatgataaactgactgccgatattaaggcggccaacgatgcctataaaaaggagctgcaagaccgaactgacgcgatttataacgccatcggtctatttgacgatgtctcaagtcaaaatgtgaacggctccaagctgacttcaaatcttaaaaagcagctggacaagatcaaaacgttcaacactgacattacaaaaatagcaagccgggcaccaaaggcattcacagacgaattgaaagaaatgggtgtcgggtcagctgatcagattaatgcaatagcccgcatgacagattcagagctaaatgagtatgtcagtctgtggaaagaaaagcacaagctggccagtgaccaggctgctcaagaattaaccgggttgaagaacgcgacgaccaagaaaataaatgaattacggtctgccgcaaataaagaactggcacttttgaaaaatgactatctccgcaaaattggggagcttacagtggatgtaaaacagcttggttctctcaagaaaagcggaaaagccatcggttcaaatacaatggccggcattatttctggaatgaagaatatgaagggcgagctggcgaaagaagcaaattccatcgcctcgacaattgaaaaaacgattaagaagaaattgaaaatccattccccatccagattgatgcgggatcaggtcggggtcatggttcctgccggtatcgctgtggggattcagaatggtatcggcactgttcagaaagctatgggcgtcgtcagtgatgccatgactattcagcaggaggatctgaattttgcatatgacacatccatttccagcagcgaactcggcacggttagaaaagaattgagcgcggacatccggaaccttgaattgcctgacaggatgattgttgttgagatggacagcaagaaggtcggtcaaggcgtagaaaaaccggtcacagacgctcagaaaaggtcgaacgcaaggaggacgagatttaattgatcaattatcaggaactgctgcctaatcaatggaaaatcacgtttgacggcattgatatatcacccttcttttatgtgaagtccacgggcggccggggagtgaccggaagagaagtgaatacagccactatcgggaatcgccccggcggtttcctgcggaacacaagaattcctgtaagagtcataaccgttgaggttctttttgctttcagcagtgaagaagagctgaagaaaaagcaggaggaactgacttttattctgcacaccgaagaacctaaaccgttaatttttcacgatgagcctgacagagtctataatgctgtctttgaaagcatttcagaaggcgaagaacagggaggctttcagactgcaacattgacttttatctgtcctgatccaaaaaaatacggcccggcgaaggattttgaatttaattcaggtattcagactatcactaatccgggctatgcggccgtagacccgacaatcgaatgcgtctttgaagagaaagccacttcatatgaagtggctcttcttaatggtgatgggtctgtatcgaaaacgatcaagctgctgtacgatttcatcgctggtgacacacttgtaattgattctgcaaaaagaaaagtcacttgcagcggtaatttaatcatgacagcacttcaaattcaatcagattggtttctgctgccgcctaggacgccagttaaaatcaagttcagtcataagagcagcatcaaatttaatgaggcatatttgtaaggaggtccggtcatggctgacatttatatactttcaccagatgataaattattgacagtgctgtccagccacggacgagaaacctgtacgttctgggatgcgaaatacaaagaagagctcaacaagggctcttctttttcttttgtagccgatgcctcccaccctgatgcgcgcttcctattcgaagagaatcaagtggtattcaaggataaggacggtgtaatgcgtctgtttgtcatcaaggaactggatgatgcagacgaagaaggagaggttaacacccaggttacctgtgaggctgccatgatggagcttgccgaaacatttgtaaaagatttccgcccaactaacaaaactgctcagtttgtactggacaacgtcctttctcggtcaagatgggtggcggaagtaacggcggagcttggagtgaattcgactaccttctataaaaaaacagcgttggattgtattgctgacgtgatcaatatatggggcggagagcttcaggacactatagaatttgatggaaataaggtcgtcaaacgaatcataaaaatacttccccgtcgcggtaaagacagcgggaagcgctttgagagtgataaggatacaacgaatatccggcggactgttatcagttacccggtgacagccctttggggttacggggcatccatagcatctacggatgaggaaggagaggaaacgggcggctattctcgttttattgatttctctgaagtagaatggaaaaaatcaaaaggcgacccggtcgataagcctttaggccaggaatgggttggcgatccggatttattagaacgattggggcgccttaaagatggaaagttgatccatagggaaggccaatacaatgatgaagacataacggagccggaagagcttttaaaggccacatataatcatttgataacgactgcatgtaagacagaaatcaattatgagttgtctgtgcagctgcttgagagcgtgccgggacacgaacacgaacatgtggaattgggagatacaacgatcgcaattgatcgaaacttcgctatcccaatcgagacatcgcagcgcattatttcaatggaatacgatattaccgaccctgaaaatacttgcgttgttgagatcggccaatttttatcagcattacaaaaagacggccggattgatcaaattgaaagcgtgatagaaaaaaaccgcggtacttgggaaagcaaaccggatgccggggaggttacggatggaagtttccctgacaaagccccgccagttccgtcgaatgtagtgatcaaggcaatgtttcagaatgtggccctgacatgggattatgatccgtccagttatattgcagcctatgaggtatatgcttcacaagtaaatggattcactccattaaaagagaatcgtattttcagaggcaaaacaggcggatatgagcattttacgggagtaaatgaagtttggtattatcgcttgcgctcaatcaacacacgaggcacagcgagcgaattcacggatcagttttccgcgaccactcagcgcattttgactgatgacattgttttcggagcgatcacaaaggaaaaactggcccagctggccgttgatgctgataaactttcaagaaactttgatgatgctaatatcttacctggctctcttttaaaatctaaatggttctatgattatacggacaccagccacagtgttgaggaaaaagaatttaatgaaatgactgtttctcagatcatcaatggaacaactagaatagctttcggaatatgcgggaacaggtcatcgcctgttaatattcaaagaatggcattgatcaaagatcaacaatatacactgtcatttgaaataaaacggaataataccaccgacataagttatattcatttgaaaaaaggcagcactttcatacagattagcagcgatgaacagaaagatatttctgcttttccgtctgaccaatttataagggttaatatcaaatttactgctccggaaaccggctctgattacacaattggaatcggcggatataatcgaaacggaaacactgagccctgtagctttgttattcgtaaggtacaggtgcgcaaaggcgatgtcatttctgattatggttatagcccgtttgatactcagctggttgatggtgttattgatggcgaccacctccaaaaggcggtaatagaaacagctcatataaaaaatgcagccataacaagtgcgaaagtagctgaagcggctatcgggacagcggctattcaaaatgcggctatcgcaaaggcgcatctaaaagaagcaataattgattcggtacacatcattgacggttcaataacaaacgccaagatcaaagacctttcagcggacaaaataaatgtcgggacgttaaaaggtatcacgattgagggggtgaccataaaaggggcccgtttcgaggcgctgacacaatcagaagatgccgaatactatatcgaaggcgataagatttaccagtacaccagagactctcattatgtttacaacaaattgattgttagttctgggaaaataacgcaggaacaaggaaagttttttgatcctggtgattcctataatgaaatctacagaacagtttcaattggtgatggcaaaatagagctccgtggcgcaggcaagcaaaccgcatatgaaacggttccaactatttcaatgtattcagaaataggagatgttggacaagttataagccattttaatatgaaaatggaaagacaggcagctgttgaagaagacgcttttcttcttactgctactaccaatcctaaaaatataggagagccgttcacatataaccgttatcaggccctttttgaaggatcagctactatttatcgctttaaaccgaataatttagatattgatgtccccggggtcattcgactgaaatcaggccaaaaaacgattgttgatgcatcagatttaacgctgccattgggaaccaaagttgtagcagggaatgcaaaaaattgcgaattcaaattgatgggtggcaatgtttctacagaattagaagacgagcatggaggcctacaatacggtttgatggtttactgctttacttgggacattaaactgccgcctgacggaggggcaactgcgtacgcgcgctacaatcgcattccttttgttgatagttttgattatgcgcctgagaacgtttttgcggcggtaggtacagcgattggcgcatattctaatgcggttacggtaggattagaaaatataagcgccagttctgttgatattggagtgagagggaccgggactactgccggagttgcgggaaaaacaataaaggttcaaattgttattttttacgaatcacaataagggagtaatttttatggttgaaaaaagggattttaacatgagtctttattatgcggacggcatcgaaatagaagaaaccggcgcgggaattgaaataactgccggctctataaaaaaaggagacaagacatatcccatggaggctgtttcgttcgatctgcagccggacgatacaacaaaagtagcgtatcaattatatgtccttcatgatataaaggctgatgaaataagttatttgctcacaaaaacttatgtagagcctgacggttattatcaagggtacagtgggagcaaaaagcttattatgattccagttcaaattgtcgttgatccacaaggcaaccgagaagggcttataacaatctatgttcaaaataaggaggatggcaaagatgaagcttgagcccgtggtattaaatattgaagcaaaagatagagagaaggaaaagactacagaggaaaagttgcaggaacaagttcttgaccttcagcgggtttgcaatctcttaatgaatcaataaaaggaaacggggggagcccattggagaaccgaagtgctcttttcgggttttttgaggattgctggaaaaacggaactgttttgaccgttgaaatgagaaaagccgttgagaaaggccgcatcacacaagcggaatatgatgaaattacagaaagcgaacgcggtaatgcgtatcccgatcaagagtaaggagtgaaaggcatgcaagaaatgacaaaagagcaacttcaggaccagttacaaatagcagcatataaagctgcttccctacagcaggaattgaatctgaagaacaatgagctggccgaatataaagcgctatacacgtttacagataataaacgcgaggaactcgaaaagcaattaaatgcggcagtagcggcgaaagaaaataatagtgaaccagcacctgtaactgaataggtgtttttattttgcctcgaaggaggtgatcaaaatggagggaatacatgtgtggatgaattttgaaagcttacagatcgcaagaacatatcttttcggggaggtgaagtaccttgacttgcttctaatcctcagcatcttggatgtcatcaccggcattatcaaagcgtggaaaatgaagcagctccggagccgcagcgcgtggtttgggtatgtgcggaagatgctcagttttatggtggtcatcgtcgccaacattattgatacgataacaaatttgaacggcgtcctgacctttggaaccgttcttttttatatcgcaaatgagggcctgtccatcacggagaatttggcgcagatcggcgttaaaattccggccgtcatcactgaccggcttcacgtaattgaaagcgacaacgatcagacaaaagaaaaagatgatcaggcggctggttaatccggctgcttttttgaatccaaaaacagaataggagagattttatgtcagcatacagaaaccaatatattgatattaataaatggacgcggccgggaatcaaaaacaacggcgtgaagaaacttgtggtgcattacacggccaaccccggcgcgcctgctgccaatcattatagatattttggccaaacgctccccgcacagaacagaaatctatctgagaaaaaacagacgtttgcatctgcacatatctttgtcgatcgtacagaggctatttgtatcattccgttgaatgaggttgcctatcatgcgaatgacattcagcaattcgtcaacgggcagccttaccggggtgtcgcggcgctgaaaccgaatgcaaatttcttatctatcggcgtggagctttgcattgaaaagaacggcactttccatccggatacgattgcccgtgcaggacaagtttgtgccgagctgtgcaaaatgtacaaacttgatccaaccaatgatattgttcgacattatgacattacacataaaatttgcccggcgccgtgggtaagcaactctcaagggtttgccgattttaagagccgtgttgaaaagcgaatggatggtgtggttgtaacggcgcctgtatcaaatccggatgttacccatacagacacaggaagattcatcaaaaacacggtggtttcaagcgatggccttgttttacgtacacaacggagcgcctcttcttccatggtgcttaacctgccgaatggcacggttgtaaaatatcagcttggatcaactgtcaacggatggggatatgttgaatacaccaattctaaaggccagacattccacggatatgtgaatgtctcatatatcaaaagcgataacgagctgaaaagcggcggccaaaagaaggtaaaagcctcaaagcctaaaaccactcaaaaatcaaaattcagtctgcctgcgggtgtttttaaagtgacaagcccattgacccgaggggaggccgtaaaacagattcaaaccgcgctggcggctcttcattattaccccgataagagcgcaaagaacttcggaattgacggctcatatggcgcgaaaacagcaaatgcagtcaaacggttccagtctatgtacgggctgcctgctgatggcatttatgggccgaaaacaaaagcgaaacttgaaaaattattgaagtgatatagcctcgtccaatggacgaggctttttttgttgtaaatgggagaaatacataacttttaagctagtatgaagtcaaaaaatatacttttattggtgaatatatggtaaattcttttatgtgtgttatttctaatgaaatgagggaatttaattggacgaattaaaagaaaaaagaacagggacggttgcccagccattaccacaaccagcagttgacgaacagcttaaatcagcattccaaatcatgacatctgtggtgaacgattcgaatcgaacgtttaattctgaaagaaaacttgataatgtagctatttttgttgattatgataacgtttactggtctctaatgaataattatagccatgatccagattatcaatctgaagataaaaatttattttcaaggttatgggaacgatacggtcaagacaatgtacgttcatttagagtgtatgcggattttaacaaattaagaagtaatatgacaagtcttcaaaaaaagcgtgttcaaataaggcatgtttattcaaatggaaaagatggggatcatcgtaaaaatgcatcagatattgaactttgtattgatgctattgaaaatacatacaaggatccttcgattagttgttatgtttttgtaacagctgatagtgacatgattcctattatgagtagattaatgtacaagggaaaaagagttgagctttattattcagctaaaaacgctcctaaacatattgaatttaagaattatgctcatcatgctgaagatttggcgagtttacttggtattgaagaaaagcagtatgaccgagataaacttatgaatcaaattcttgttgagataaagaaatggcacgatagctttggtacacaaggagatctgttcttaggcttgagttggttcaaaagatatctaataaatacattatcgaccccagcagagattattagtgagattttagaggaacttaaacaaaagagctttattgttgaagagacaaaagtgttaagcaaaggtaaattaaagggcagttccaaaaatcaaatcttatgttctgaattagggttagctaaaataactgaatcagaagatcaagcacaagttgtaaaataattgcttttttgcttgacaggaaatatatattggatgtattatgaatacacattagaaaacacatacgctattattactattcgctacatattcgctaaagaaagcagggagataccctgctttcttttttatttaaaattccacctgtttttatgcttatcccacttcaaaatgcgctgcctcatcaaattcttcacagcagcacggatcgtctgctcatctttcccggttttccttttcaattgttccatggagggatttttcccgaagcgggtcatattaaaaataatccgatacactttacgctcaaaatcggtcattgtgtttcatctccttggagacgattataaagaacgtgtgttcgcgatgcaaacaaacctgttattttttaaaaaataacacaaaaataacgaaagttgcgtcagggtctgaaacaatgcggtttttgtttcttttccattcatgatcacactaaaaaaataacaccgattgaaagggtgcgaaagcgagcgaaaaccgtggtaattatgggcggcatgatgtaatctcccttgggtataccaagggattgactgttgagttcacttgaaatgctcatagcgttctatcagaaaggtcttatcagttactcaactagataagaccttttttgtttataaaaaagagaaggtatgagatcgtttgtctaagattgacctcacactttcctaactacaatgtgatttcctcatttccttcaagcaccattctcagctgctccacctcaccccgaatcccaatcccaggctcccacgaatcaatcagacgaatggccttctgattcgattccatcgctttcgtattttctcctttacgatacaacagctgtgccattccgtaatagtaatagatcaactcaacttgattggcgttgtgtttgtcatagagcatttgttcaaaggctttttccgctttttcgagttgatcacacttgacgtaagccatgcccaggttgaaataggcttctatcgttttttcgccgccgtatgcggcgctggttgtgtttgccgcttcgtataatgtgatggcttcttcgtagtgagagcgggcgaaactcaggtcgccgcggaccagaagaaccctgtgccggataatgggggagacgggctgatctttgatgccgtccagcattgctgccgctttgtccggttctccggtttttaacagcagcctcgattgcagggcgattccccatactttcaagtcgtcgtgatccggcgcgcctgattgttcgagtatcttcaggccggcttctatttgcctgagggcttcgtccgcatcattaacttccatcagcgcccagcctgccgtgtcgatcctgaagtaggcttcccgcgtgtgttcgcctgattgacgggcggcatcggcggcttttaatccgtattcgattcgcaggggcaggttgattctgcttagaaaatggctgatgcggatgatgagtttgatcaggatgtcatgttgtccggtttcactcgaccattcgatgacctttaggatgttcggccattcctttttcatttgctctaaattccgtcccagcagatagctccaatagacagaattgggctgttcccgctttatatgggtttccgcataatcgatataataatgcgcccagcggctgcgggctcctttttcaaattcgtgattttcggataagtgctgttctccgtaagcgacaacggtttgatgggctgcgtattgaattcttccttcgcttcgttccggctgtattaaagcatatgaccgcatttgctcaatcgcgtaatgaaaccgccggacgtctaatccggccgcttgagccaagcttttttcatcagggggcttagcgaaaaagcaaagcgtctgccatagtttccgtgtgtcttcatgacatctgtcccatgtgcggccaaagagaacctcaaacaattccaataatgagtagcccgcttgtttaagttcttgaatgagctggggagcggggatgtcgtcgtctgacatgtatgcaatgctcagtgccatggccttcgggttgccggcggctgccgagacgaattcattcttaaggtcaggcgatagccgccgcagctgctccagcttttcccgtttttgcgggaggttgcatgtttgcagacagcggtgcacttcttgatggaaaaattcaagggcatccgtttgttcaaggccgctcagctggatggccgccagttccccgaggccgtcccggtatgtctgttttacgttttcccgtgccgtaaggagaacttttacgccttccggaagaccgatgataaattcgtgaatgtcacgttccgctgtatcgatgctgtcaacgatcagcagcacgggtttttcgtttgaatgagcggctaatgcattacggacgacgaaccgtttttcgttgatggatttgtctatttgttctgcgcgtccgagctgataggcgatcgtgtttaaaaaatcgctgaagctcaatcctttccagtcagcgctgatccaaatgatgctgttgaatgcaggccaatctggtgaaccgccggcacaaaggtaggctgcttcaagagcgattgtggtttttcccatgccggcccagcctgtgattaaacagaccggtgacggagacagcatccattgccggatcgcctctatatcaaagccgcgtccgataaagttcccggtccggcgtgacggtaagttatgcgtgacgggctgttctgtaagcgcattcgtttcatggccgggtctgtcatgaaacagccgctttactgctttttcaacatcttcatcactcggcgctccgaatgatccgtctttccggtgtatttttgctttttttagacaagacgccgtccaaacgggcaatgcgggtttgatgacgggaatggtggtggtttccagaaggccggtcagccattcagtatccatgtcagtcttttcgataatgatccagatcatgccgaacagctttccgtcgtcaattcgtccgggaatgtagtttgcgcccatctgtccgatccagcttttgatcgtgttagaggaaacgcctaatcggagtgcgatttgatcgatataagactgtcctgttttttcgttctttttccttctgactttataatcaggatgaagtttcagcgatttgacggcaggtgccagcagttctgcaaattgtgtccggttttctagttcagccattagcctgcacctcctattagtactattttatcaattcagtgttttttgtatatgaaaaaataaaaagtacagtgcggctgtccttttatacagcaggaaaggctgttgaacgtatggaaaagcagataaaataggggcagtaacagagaaaacaaaaatgtatgcacttacatttcaaagcagagaaaggattttgccaaatgactcacacagtgcctcaaaacatgaaagcggcggttatgcacagcacgagagaaatcaaaatcgaaacattgcccgtgcctgacatcaatcatgatgaagtgttgattaaggtgatggctgtcggaatttgcggatctgatctgcattactatacaaatggcagaatcggcaattatgtagtggaaaaaccatttatcctcggtcatgaatgcgcgggagaaattgccgccgtcggatcgtctgtcgatcaatttaaaataggagaccgggtcgccgtcgaacccggtgtcacatgcgggcgctgtgaagcgtgcaaagaagggcgttataatctttgcccggatgtacagtttttggcgacaccgccggttgacggcgcgtttgtccaatatatcaaaatgcgccaggactttgttttttcgattccggattcactttcctatgaagatgcggctttgatcgaaccgttttctgtcggcattcatgcggccgcgagaacgaagcttcagcccggttccacggttgcgatcatgggcatgggtcctgtggggctgatggccgttgcggcagcgaaagcatacggggcaggcacaatcattgtgaccgacttggagccgctgcggttagatgccgcgaaaaaaatgggcgcgacgcatgtcatcaatgtccgggaacaggatgccggtgaagaaatcaaaacgatcacgaatggcagaggcgttgatgctgcctgggaaacagcggggaatccggcagcattgcaatccgcactggcttccgtgcgccggggcggaaaactggcgattgtcggtttgccttctcagaacgagattccgctcaatgtgccgtttattgcagataacgagattgatatatacggaatcttccgttatgcgaatacgtatccgaagggaattgaatttctcgcttccggcatagtggacacgaagcatcttgtaacggaccaatatccgctggagaagacgcaagaggcgatggaacgcgcctttcaatacaaaaatgaatgcctaaaagtgatggtgtatccaaatcgctgagtgaacggggaggatctttgcattctccctcttgcttatcaaaaatgaaaacggattcttggggtgggaaatgatgattgaaacagaaaaagcatcggcagtaaagacgaaacatcgcggcctgtcctggatggaacggatcggctacggattcggcgatatgtcgtacaatattatctttcagtttgtaaacgcatacttattattctactatacagatgtcggcggcattaagcctgcggtcatcgcagctttgtttcttatcgtaagggtgctggacgctatttttgacccgattatgggcgtgattctagacaagacgaatacaagatggggaaaggcaaggccgtatcttttgtgggtggcgtttccttttgcgttatttacgttcttatgctttacgactcctcatttcggcgagacagggaacatggtttatgcgtacatcacttatattctgcttgggatgtccttcagcatgcagacgattccggtcaacagcttaacgggtcggatgacgaattctgtggaggaacggacggttctgacgacgacccggatgattttggtttatatcggaattctgttatcgatttcctgtgcgacaccgcttgcggacgccatcggcgggaaagatcaggcgttcggattccagatgacggcgcttatctatgcggcggtgagcatcgcattgaatctgttcagcttctttaccgtgcgggaacggattcagcctgaaaaaagaaaaaaacaaggaatgaaaaagacgttgtctgttttgttccgaaacaagcctttgctcattttggtttcttcatttttagcttttgcgatcgggtttaacattaagctcagcacgatggtgtactattttacgtataacgtcagccataaggaatttgtgtttttaggaaccgtgctgtttttcggcgcagcgctgatcagcaatctgtttattcctttcttttctaagaagcggggccggaagcaggtcatgatcatcacggcggcgttatcgctgatttcttatgcgggccttcagtttacatcgtattcctcgattccccttattttcttttggcttttcgtttcgggatttttcacgacgcctttaaatacgcttgcttggggaatggttgccgattgtgtcgattatgcggaatggaaaaccggagtccgggctgatggcgtggtgatttcgagcatgagtttcatcaataagctcggagttgcgttagcggggtcattttcggccgtttatctcggaatcgccggatatgccgcgaataccgatcagaccgcctcgtcattgaatgcgattaaaaatatgaatgcgctcattccgggattgttcattctgctgtctattattcttatttctttttatcctttaactgaaaaaaaatatcagcagatgatgtctgatctggagcaaagggctgccagataagtatacgtaaaatttaaaatattctatgtaaacggttgtatttatgacagaaagcactatactgaaactataatcgagaattgataaatgagtgtgataatgtgggaaggcaatctgttatttgtattggagaattgttaattgatttcttttgtaccgatgtggatgttgatttgacggaagggcgcaatttcttaaaaagtgccggcggcgcaccggcgaatgtgtcggcagccattgctaagctgggcggagacgcggctttcagcgggaaaacaggcaaagatccgttcgggtactttctgaagcagacattggacgccgtacatgtcgatacgtctatgctcgtcatggatgagaaagcgcctacaacgcttgcgtttgtttcattaaaacaaaacggggagcgcgactttgtgtttaacagaggagcggacgctttgtttacgcttgatgatattgatctggaaaaggtaaacgatgcgaaaatccttcatttcggatcagcgacggcattgttatctgatccgttttgctcggcctatttacggctgatgtcgattgcgaaagacaatggacagtttatttccttcgatcctaactaccgtgaggatttatggaaaggaagagtttcagagtttataaacaccgcaaaaaaagccattgccgtaagtgattttgtgaaagtcagtgacgaagagcttgagatcatcagcggtgcgaaggatcataaagaaggcgttgcggttcttcatgagcttggggccggtattgtggcggtgacactagggaaaagcgggacccttctttcaaatgggaaggatattgacatcattccgagcattccggtgacatcaatagactcaacgggagcgggcgatgcgtttgtcggcgcggcgctgtatcagctggcgcgcacggatgaggttcagacggcagccgaagattttgcgaagctgcgtgatattgtctcatttgccaataaagcgggggcgctcgtgtgcaccaaaatcggtgcgattgatgctttgccgagcttaaaagaggttgaagtatcactgtaaagtatggaggatgtttcttgaaagtcatcggacttcgggaagcatcctctttatttaggtctgaaacccttttcgatatacggtatactttagaaaggcatccagtaaattgaaccgctgtgaagtacatacaataatgtttttatcagttctgagtaaaaccaagtttctgctgctgccgtcatgtacagtgtgacggcctgtgatattgaaccgcggaggaatttttttatgaaacatgtttttcttattgtgcaatgcgcgttttctgttttttgttttctttgtctcgccgctgtcaattggtatcaggggagtgagcttgtttctgactcgtttgattggaatgatacggctaaattctcaaagcttttgaatgggacggatacgattacaagtccggaacagatttcgcagctggatttctttgtgtatgcggcgaagcattatccgttagtgagcgggttgatgatcgggctgtttgtttattctttgttctcactgtatctgctcgtgaagaatttccgccggcacaaatgggctgaatgagactattttcatataaaaatacataaattcaagagaaaatgaaacctttttcgaaaaaaacagtatatataactgtgaacttgttactatttaattttgggaggaaaatgaaaaatgagtattttaggaagatttaaagacattatgtcaagcaatatcaatgcgctgctggataaagctgaaaaccctgaaaaaatggttgatcaatatttacggaatctgaacagtgatttaggaaaagtgaaagcggagacggcttctgtcatggctgaggaacagcgggcgaaaagagcattaacagaatgccaggctgatgccgaaaagatggaaagttacgcgatgaaagcgttgcaggccggcaatgaagccgatgcgcggacatttttggaaaggaaaacggctgttgaatcaagactgactgagctgcaaacggcttatcagctcgcttcttccaacgcgtctcaaatgcgcaaaatgcatgacaagcttgtcgctgatatcggagagcttgagtcgcgaagaaatgccatcaaagcgaagtggtctgtggcaaaaacgcaggagagaatgaacaaattggggtcctctgtgtcaaatgcgggccaatcgctgacagctttcggcagaatggaagacaaggtcaaccgggcgcttgatcacgccaatgcgatggctgagctcaacgcgtctccgaaagacgatattgacgagctgacggctaaatatgacagcaatcaaagcagtgtcgacgatgagttggcggcgcttaagcagaaaatgcttttcagtaaagatcaatagacagcgggctgcagctttgtccgatataaagagaaagtgagagaaacagaatgatcatttcttataaatgcccgaactgcggcgatgatatggtctttgacagttcatccggcatgctgacatgtcacagctgcgggcggcaggatcagattgaaagcctgccaaaagagtatataacaacgagattttccgaaaatgaggcgaacgagtaccgctgtgagaactgcggcgcggtattaatgactgaggcggaaacgacggccacgacgtgcgggttttgcggaggagccgccgttctcgccgaccgattatcgggaaatctcgcgccttcgatggtgattccttttacgatcagtaaagaagaagccatgagcgcttttaaaaagtggtgccgaaacggccgtctgacaccgaaaggatttatgactgccgatcgggtgaagagcataaccggcatgtacgtgccgttttggatgtttgacttaaacagcaaggttcaggtcaatgccgtttgtacgagagtgcatcactatgaagatggagaataccgggtgacggagaccgagtattacaacgcgtaccgcgatatcaatcttgattatctcaaaattccggtcgacgcttcagaaaaaatgaatgatgaattaatggacaaattggagccttactcatacagtgagctgaaggagtttaatacggcctatttagcgggatatatagcggaaaagtacaattataccgatgacgatctctttccgcgggcgaaggataaaatcagccattatattgattcttatatcagatccaccttctccgggtatacgacggctgacattacggatgagcagattcagaccgataaaatcagcagcttttacgtactgcttccggtctggatggtcagctacgactatgagcgggctgagcacatttttgcgatgaacgggcagacgggcaaggttgtcggcaaaccgccgatcagtgccggaaaagtggccgcgtggttcggcggcataaccgccggtgcgtttttagcattaagactcgtctcacttatgataggaggcggtttttgatgaaagtatcgataaaaaaagcgtgtctcttctgcttcgtcctttttctgatgctgtctttttctttacatacatcggcgtctgccgcggaacagaagcaatatgtttatgacaatgctcatttattaacgaaggatgaaacgaagaaacttgaggaattggccgggaagctgggagaaaagcgccataccgattttatcattcttaccgcaaacggaacgggcggtaaggagatcgaacagtatgccggtgatttttatgacagtcattttagcggaagcacggcgatattgactattgatatgaaggatcgggaagtatttctctccggatataaaaaggcggagacgtatttgaacagcagccggctgaatacgatcagaaatacgatctcgtcagatatttccgcaggccattatgaaaaggcgtttcagacttacatcaagatggcttataaagatatggggaaaagcccggacgacaggtctgacaatctgctgctcacatggtggtttcagctgattatcgctgcagcagcggccggaatcgccgtcaccgtgatggtgtacaattccggcggcaaggtcaccgtcaccggcagcacgtatatggatcacgatacgtctgaagtgctgagccagcacgacacatatatccgaaccgacattacaagagaaaaaaagccagataaagataatgacaatgacggcggagtcacgaggggcggcacgagttacagcggaagcaagggaagtttttaaattatatgtaaaggatttgagcatacatgggttttttcagaaatcagttagcaaatgtggtggaatgggaagaattcagagacgacatggttttctataaatggaacaaccgtgaaattaaaaaaggcagccgtctgatcatccggccgggacaggatgccatctttttatacaacgggaagattgaagggattttccgtgatgacggcgattatgatatcgaatcagaaatcattccgtttctatcgacactaaaagggtttaagtttggctttaacagcggcatgcgggcggaagtgctgtttgtgaatacgaaggagttcaccgtgaagtggggcacaaaaaacgccatcaacattccggcggcaggtatgccgggcggtatgccgatccgcgcaaacggcacatttaacttcaaggtcattgactacatcggattgattgataagattgcgggtgtcagagacagctatttagtagaggacattaaaatccggattacgtctattctcgatcagcttttgatgaaatggatcaccagagaaggaaaagacatgttcaatctgcagtcgaattcatttgaaatcggaaaagggattcaagaagatcttgatatgcagctgatcggagacggcatgtcgattacgggcttcaatattatgagctttaactatccgcaggaagttcaggatatgattacgaaaaacgcttcttacggcatggtgggcgatgtgaaccgctatcagcagatttccatgacggacggcatgtcatccggcaaaatgagcggaagcggcgccgcctcagacatggcgggcatgatgatgggaatgaatgtggcaaatcaaatgatgaaccaaatgaatcaaaatcagcagaaccagccgcagcaaaatcaaagtcagcagaatcaggggaccgaacaggcaaacggctcggaaggagcggctaagccgaaattctgtccgaactgcggaacgaaaacggaaggcgcgaatttttgcccgaattgcggacagaaacttgcctgatgatatacgaaaaagaggcctttttggggcctctttttttgtcatgatttcattgtttgaacgatgagggatgtcagcgcttttgatccctcaggtatgagatggacgccgtccggtgtgaagtattcagggtgctgcaatgcttttgcgtgccaatcgacaagcgtcacatttttgcgtgactcggcctgccggcgcaatgattcgtttactttgctttcccactgccgcggtacacgcgtgttgacaagatagatatcggcttttgaaaaggagctgatcagtgattcaatttggctgtttgtgaaatagccattcgtccctaactcgatgatgaccgctttgttcggctgattaaatgacgcatattccgaagtgagctggagtgcttgagagacttgtcttcctacctttccgtcgatggtgacatgagggagggactgccgcaggtatgacgcaatgtccagcatcaccgagtcaccgatggccagcacgtcttgctgaggctgtgtttgttttggatcagccgttttttgagatgaccgttcctttttctcgtcgtttttcttcgtatctgatttgtctgctggttctttcttgtttttgtctgacgcggtatccgttttttcgccgccgtgttttttcttgctgtcttcttcttttgcaggctgatcgtgatcggccgttttgtgcgaagaggcggcggtttcttgctgatcattctgcgcgtacgtccattgcggctgttttttctcttcggctatccctgacagcccgcccgcaaatacgagaatggcggcaagaatgaggccgagcgacattctgctgatgacagaggacgtcttccattccagaaagcggttcagaaacacgcggcgtaaaaatggccggaagcccgcagtgcggatcggctgttcaatgaaatggtaagatagctcggcaagaatgaaagtggcgccgattctgacggcgcagtgccaataaaccggatttccgatttcctgcacgggtgtgctcagtacgaaaaccgggtaatgccaaaggtagattccgtatgatctcgttccgatccagcgaagcggcttccatgaaaggacatgtcccaaaaagctgctcggatggcataaacatgcgacaagaaccgctgcggtgatgctgatcaaaagcatgccgcccttgtacaggaagggttcatattcatccgtgtaaaagacgcaaagcagcagcgcggcaaaagcggcaagctccgtcccgtgaagcaggtgtttcatgctgctcggcagccgtttggaagataatcgtttcatcggccacactaaagctaaagcgcagccgatcagcaattcaaatgaccgggtatccgtcccgtaataaacgcggctcggatctccgccgggcacatacatcatactcattacgactgccgaacataacgcgaggaacatgaccgcggccgcaagccgggcccgtgttttacatatgtacattcccgcaagcagcaggaagggccatatgatataaaactgttcttcaatcgccagcgaccaaaggttttttaatggcgaaggggagccgaagctgtcgaaataagaaagttgatgaaagataaaccaccaattgcttatgtaaaaaagtgaggagaccgcatctccgcgtacggtatgcaggagctcgctgttaaacaatacgacccaaatgaccgtcatgataatcatcagataagccgccggcagaagccgtctgatccggcgcacccaaaaatcacgcaaatcaagggtgatggcattgccttggacaggcaatataatagatgtaattaaataccccgataaaacaaaaaagatatcaacaccaatgaaaccgccgtcggcccagttaaaattcagatgatatgcgataactgcgaggacggcaaaggcgcgaagtccatccagtccgggaatatagcggtgatgcagtgacttgtctgacatggtattcctccaataatgtgtgcggaaattctcgctgttttgcggatagctatagctgatttctgtacagtcttccatttgttccgttaattagacgcattcggaaggggattttgtttcagaaaaaatgtatgaaatgctgtgattttcttaaacttttcagtcccagtccggcgtctgttatatgaaaagggtcccttatgcatcttggctgttgcgggacgaaagaaaaaatccatgatctgcggatatcatggatttttttctttctttatctgatgtagcggtctccgacaagcagcttggagatgacggaggtcggtattgtaaactctgtaacgcccatatatccgggtgccgcttcgtattcatcaaatgaaataacaagtttgtgcttatctgtaatataaaaattctggtcggcgcggatggctttaaaaggctccgtcatatcatcttcttcgacccagtatattttattcggatcttctttcatctgttttttcatttgttctttaatattttcgctgatgactttaatataacggtcatctttaaataaactctttaacgtaagcacggcctcattctttttatcaatcgtgatgtaacggctttgcgtataagatgaagcttgcgttttttcgatatcacggcggattgagatcagatccgctgtgtcagtaacggtttcataatcgctgtaaatactgaggtggccttttttgctttttgaggtcgccttcataaattcctgatacagctctttgctttctttcatataatgccggttgatgctgtcttcgagtttatgatcggaaagtccggacagagcgggcgttttcacatcaatgcttgattggttcttttcttccttcatctccgtgaatgtgatggcttggacgactttgccgatgacggggattttagacatggcttgtgcggcatccgggttgatattgacaacggcggtaaataagacggccgcagcgactgccgcggatgtcggccacatcacgattcgttttttcttcggtttttgctgaagggctttttcgacaatgctgtccagttccttaggaatgggcacacttttatactcttctcttaattgttctaatctcttttccattaagaaagatcctccttcgtcagctgaatgcgcatgagcttcagccccctgtaaaggcgtgttttgacggtgttgatgttttcccccgtgatgtccgcgatttcttctaatttcaggtcttcaaagaaacgcagaatgataatggttttatattgatgcggcaggtcatcaagcgcttcgtgaaggtctgtgtccttgtagtgatcttcctttcctcggcttaaaaactcgatcgtttcatcatccatcactttcagttttttctgtttgcggagaaaatcaatggccgtgcgcactaaaattttataaaaccagcttttgatcacatcggggtttttgacggattcgaccgatgtcagcgctttttgaattgattcctgaacaatatctaacgcgtcatccttgttttttacgtaactgtacgcaagccggtaaaagtcttccttgcgctcagttatgcacgtcacaagcgacgctttggctgtttcgttcttcattgcttcaaagggctcctttttaaaaaatacgtatcataggctgctgcctaaggatagacgggacagggtgaaaaatagtttgcgcagaggggatcatttttaaaaggaaaaggaaggaaagacgatgagatgaaaaaaagagccggaacggctctttttcggatgtgtctgatattcagctgaacggtttagttcggtttgactaagattttcacttggtttttctctttgattaaagcgccgaagccttcttcaatcagatcgtcgagcacgatttttttcgtgacgagcttatctgctgagaagtagccctctttcatcagtgcaagaacggaagggaagatgtcacggtatccgataatcccttttacggtccgttctttgatgacgatatcgttcggatgaatttccgctcctttttcccagatgctgacgataaccgtttcaccggcaatgtttgttgactggatcgcctggcggagaacgacaggaacgcccgttacttcataagaaacatcaacgccgccgtttgtgcgtttagcgatttcttcaacgacatcgtccgtttttgacggatcaatgatgatagcgccgagttctttcgctttttcctgacgttccggtgaaagttcaaccgcgtaaatatctgtggcgccggccgctttcagggcttcaatcacaagcagcccgatcggtccgcagccaaaaactgccgccttgtcgcccgcttttaatttgctttggcggacggcgtaaagcgctaccgctgacggctcaacaagcgcgccctgttcgtaagaaagctcttcaggaagcttaaacagcaattcttcgtcaacggatacatattcagaaaatccgccgccgcctccggctaagcctaagaatcccatttgttcatcaaggttataggctccctgatgtccgtgtgtggcaaaaatcggttccacgacgacacggtcgccgacgctgtaatttttgacgccttcgcccacttccacgacttctcctgagaattcgtgacccatcgtgacgggcgccatttcgtttgttaacggatgaggttcgccgaccggaataaagatcgggcctcccaaatattcatgaaggtcgcttccgcaaatcccgcaccatttgactttaattttgactttacccggttctgctttaggttcatcaatgttttcgattcgaatgtctttttgattgtgccatcttgccgctttcattgattatcactcctagtctgattgaaacgagtataggtacatgatcaatatgaaccacggttaaaaggaataaagtgcttcctaaagcctgatttctcaaaatatatcatattatgcaactatcaataggccttataaaaagtccatattgaatgcagaaatactctatgaatattataacgctaatgaattaaattttgtagtataatttaccatggaattatatagaacaggtaattgtgccgtcgttatgtgcatgtctcatcacgttgtaatgaacatgtaaagtgattgaaatattataatcgtcttcttggtgtataattttgcctagaataaagaatcaggaggacgaaagcttgaagaagttattcttagccttattgattttagcaggaagcacgctgggagcgatcagtttctcttctgatgcaagtgctaaaaaagtgaacggaaatattacatggtataatggagtcggtaaaaaaggatcttccggtaaaaaactgggacactgggattgcgcgacaaaattaggatttgacgttccgagaaacggaacgaaaatcagagcttatgcgaaagcaaaaccaaaaaaggttatcacagtatataaaaatgatgtaggccgtctgccgaatgccgtattggatgtcagcccgaaagcgttcaaagcgctcggatatccgttaagcaaaggaagagtatccggacactacagctattaaaatagaccatcttaaaaagcaaggactctgattcttgctttttctgattgacggagagattgataatgaagaagaaacgatggatctggatgttgcttgccgccgttttggcggcggcggtcatcgcgtccgttttactgatcaaaggaaaaagcgacggcggcggaaaagccgttgtctccggcggccatgacaagctgcttgtttccattacagacaaagatctgatgacgaaatattacgaggacggccgcgtgctgtacgaggaaaagctttcggcatatccggcgtttgcgctggatgacgcccatcaggtgctctattttgtcgggaataatgacgaaaatgagatgcgtctgtataagcttgatctgaagacgaaaaagaagacggtgctttataaaggaacggcaagcgctgacagtctgtttttatcaaaggatctgacgcacatttatttccgtctcggaaaagcggatgaagatattttccgtctcgcatcttttgatttgaaaacgaaacgttatgaaaatctgtatcctgccgccgatgagaaagacgacagtgtaagcagcttcttttataaccgcagccaaaacgattttgcgcttctgcattattccgtcaaagaggattatcaaaaaacggatgaggcaaatgagaaggggattgaccctgaaccgacgaatatccggtttgcagcaggagctggcgaacaccttcaggacctgacaaaccttgaacagtttatcagcggcgtggcggtgtcaccggacggaaagaaccttgtctttacatcttatacacaaaaagggacggaacaaaaagcgtccatccgtctgatgaatgtcaaaacgaaaaaagataaaacgattatctcaaacgggaaggacttcgctccgctgattgatgcccagcctcagttttctaaagacggcagcatcatttatttcatggcggaagcaaaaggcgctaagcgtctgaaggatgaaacggggcggaatgcgaaggtccggaccatttatgcttatcatttggatacgaaaaaatgcgaaaaagtctgggaaaatgaccacggcattatcaatagtttttccgtcatccaatcatgaaaaaaacactcagcgcccgctgggtgttttttcatgaacaaagctggctgcggctgaggcgagccatttgaaaaaacggagaatcggaacggcaaaatgaagcgtttcgatgaatgactgtgcggcaaggttcattttccgccgttttgccatttccttcagatctttctgctgccgatcgtttttcatgttcattgctcctttgcatcataaaaggacatgataacgcaaaggcctctcatgagacatggaggccttctctatgttgagactcgtaaaagggaggtctaacttgatgccgtttgattattgttttggagatttaccaacgaacggacgccgtcgatcattttactgccgcaaagggggcaagtcggggtatcactgccggcaaaattctttctgctccagccgatacagtcctcttttgtgcattcccacgtactgacatcttctttaggcagcggttcctgattacgtttgttgtagtaagacataaagtcacttcttcccttatgaattttcgtgcactccttcattgtctcatacttttccctaatctcctaattcctttttctatccagatttccaatgagggtgcatcgtcttcctgttattacagtatatgcaaaaaagcgccttcttattttttctttttggataaataaaaaaagccccttctggagaaagggggggatgtttgtttactgcttatccgtgacgtccatcggtctcatcatgtcgtaatcttcgtgctctaaaatatgacagtgccatacgtagcgtccgctgtaaggagcgaaagtcgccgcgattctgatgacttcccccgagtgcgcctgcacggtgtctttccagcctttttcacttggaggaggcgggacggcggggcctgtatacacaatgtcgccgaatttgttataacgctctaagtcaaagggacgccggtcaaggatttggaaggaaacaaggtgcaggtgtatcggatgggttccccccatcggattgataatcgaccagatttccgttgcgccgagcttcggcgcttctgtcacaggatcatgccatcgcttgttattcagcgtcaaaacgggccggccgtatttgtcttgcgtatttgtgagtttcagtgtcctgatgttgtgtattctttttgatgttacattaggcattgttgaaagatatttaggcttccggcttgtgtcttctcccttcagcggttttgtgacgcggaattgcatcacattggcgtctgtatccggatcgacgtcgcccccgcagccggtgccgttcgttaaaatgatatgttctccgtcaaaggcggagaaatcgatgagcacatcataccgctcggccggggctaagctgatagattgtgttttgacagagcggggaagcagtccgccgtcagaaccgatttggataaacttcccgccgttattgagcgagagagaaaatgttctcgtattggaggcattaaggatgcggaaacgatatgtccgcggttcaacttccatatacggccacgctttaccattgacgagaatggtatttccgcaaaaaaacgggacgatggaagggtcgggcagcgtttcggaaggattagcaggtccgcttggataagacaaggaaccgtcgtcatttaacgtgcggtccaaaatcataagcggtacgtcgtactctccggagggaagcttcagctgcttttcttttcgctcgcggatgatatacatcccggcaagcccggcgtacacattgagcctcgtaatcgccatggcgtgatcgtgataccataacagagccccgcgctgtttgtttggataatggtatacctctttctcaaaataaggacccgtttccttaaaatcctttgtgaaccaggcttctgggtagccgtcgctgtccggcggcgttgctcctccgtgtaaatggacgacggttttgacatcgggttcctgatggccgctttctgaatggtgaatggtatgatccacgggcagaaaatgcttatccggcaggtcattcatccatttaatatagacgttttcatctttgttcacgtcgatcgtcgggccgggaaacaaaccgttatacccccaaagccgggtcggcgggagatcgcggtgcagcttgtgaaagcattccttcatggtgacttcgtaatacgtgctgccgtctgatttcttctgcggctggagtgtttcgataatcggcagttcatctgcaaatttttctagtgccatttttcatcctgtccttatcatttattgaaatcctgtactacagttaatgctgcctggaacaggttggttaaaaaaacacccgcccttttttgagggggggtgtttgcggttattgcgcaacccggctttcggaagcgctctctttcggtttttgttttttgcggaatacatatgaggcaagtaccagcagagtaataaatcctgtcagcagaaattcagaccgcattgaactgataaacagcatagataacaagatggcgcaaatggcgatgatcgtcaggtaggttaagtacggatagaaccacattttgattttaagagattcagggtttgtccgttcgattttctttctcattctcagatgtgagacggcgatgacgagatagacgagcagtgcgatcgcccctgatgaattgaccaggaacaaaaatacggagtctggagaaaagtagttcataacaacggcaatgtaggaaaaaaaggtgccggcgataatggcttgaaccggtacgcctcttttactcagtttcataaaacgccgcggcgcttcatttcgctctgccagtgaatacagcatccgtgacgtcgtataaagcccggagttcaggcaggacagaacggctgtcaggacgatgaaattcatgatttgagcggctgcgggaaccccgatatggctcaaaacggcaacgaaggggctttccaaaatattggctgaatcccatggcagcagtgtgaccacaaccgcaatggagccgacgtaaaaaataatgatccgccaaacgactgagcgggtcgcctttgtgacggattcgaccggatttgacgtttctcccgctgcgattgcgacgatttcagatcccatgaaagaaaaaatgacaacgacgatgccgagcagaacggaacttggacctttagggaaaaatccgccgctgcccgccaaattttccagcccgaccggcttgctgccgggaacgattccgaaaatgaacgcaaatcccgcgattaagaagacaacgatcgtcgctaccttcactaaggaaagccagtattcaaattcgccgaacgatttaactgaataaatattcgtcagtgttaacagcacggtcagaagcagactcgtcagccataacggaatgcccgggaaccagtactgtatgattccggcgcctgcaatggcttcaatggcaatgacgatgacccagaaaaaccaatacagccatccgatcgtaaaaccggcccaaggaccgatggcgtcatgcgcgtactgtgaaaacgaaccgcttgtcgggttgacggaggacatttcccccagcattctcataataaaaatcactaataatcctgctaaagcgtaggagacaatcgctccgggtccggtggaatgaatgactgatccgcttccgacaaataatccggcgccgatcacgccggcaattgaaatcatggtcatatgccgggtttttaatcccttagataaagagttaggctgattcattctttgcctccttttggtttgtttatgctgaatattcagacaagtattattctatcataaatgccacagacagttgaaaatgatgtaagaaaatatgacatttttttcgcattcgtacagcagaaggcgccgggatgaaagaggaacatgccattgaccattcacacgttcatatggagcctctccagctgaaataaagcttcctttctaaagggagcttttttcctttttcggactggaaacaattcgctggaaacgtttttttatactgtttatattttgtggtaaagttaggttacgataattgaaatttgagagatgactaggaggagaagaatggcttataaagaagagctgcatccgctgctggagaaagccgttgagcatattgaaaacatcatcataggaaaacgggatatcgccatactcagtctggccgccattctcgcaaaagggcatgtgctgctggaagacgtgccgggagtcggaaaaacgatgatggtccgggctttggccaagctgatcggagctgactttaagaggattcagttcacgccggatcttctgccgtcagatgtgacgggtgtctctatttataatacgaaaacaatggaatttgaataccgcccgggaccgatcatggggaatatcgtgctggctgatgaaattaacagaacctctccgaaaactcagtcttccctgcttgaggcgatggaggaagggaatgtcacgattgacggaaagacaatgcggctggctgagccgtttttcgtcatggccacacaaaacccggttgaatatgaaggaacgtatccgcttcccgaagcccagcttgaccggtttttatttaagctgcgcatgggctacccgactgccgaggaggagcttcgggttctgtctttgcaggaagggcgcaatccgcttgaaacaatcgagcccgtcatttctaaagaacagttcatcaccctccagcaaaaactggagcaggtgcgggtggatgatggagttaaagcgtatatcgtcggcattactcagcatacccgccggcatccgtccgtacatctgggcgtcagcccgcgcggttcaatttcaataatgaaagccgcgcaggcgtacgcgctgcttcatgaccgcgattacgtcattcctgatgacgtccagtatttggctccgtatacgctgccgcacagaatgatcttgaccgccgaggcgaaatttaacgatgtgacgccggaagcggttatagaagacatcatgcaaacggaaaaagttcccgttcaaaggatgtcggtccgctaatgagaaagaagatgcattggcttctatatggctggaagctgcttatgttggccgtactgacggcggctgtcttttcttatgccatgtttcagggcggatttgtgagctggtttttattttatgcgtttttgccgtttaccgtttacgccgggctggtcgctgtgtacccgttgcgggcgtttcaggtgacgcgtgacgtgtcctccgcccagttaacctcaggcgacaggctgtctgccaccatcaggctgacgaggcgcctgccgtttccgctgacatatatggtcattgaagatgtgatgccggaaacgcttggtgagaggcgcagtgcgaaacagcttgtgtttccgtggtttcaaaggaagatgacgttacaatatgagctgccgcaggtgccgcgcggagagcatcatttacatacgatcagagttcggacgggagatgttctcgggcttttggacaagacggcgtcgttttccgtaacggatacggttctggttttcccggcgtacgggcctgttcactataagccgcaggctgcatccggagaagagggtgcgggtgccggcgctccgtttcaggtacaccgcacagcaatggctgcgagcgtcagaaattatcagccgggcgaccggttttccgcacttgactggaaaacatcggcgcgtcgaaatgagctgatgacgaaggaatttgacccgttgcagagtatgaatatgattctccttttggactgcaggccgtccccttcgtttgaagccgcggtgtcagcttcggcatccctgctttacacggcgcttgtgaagggctctcccgcaggatttatttcattggggagcgaccggactgtatttcccgtccgggagggagagcggcatttcagacagatgctgcgttacctggcatcagcttcagagtcggaagaagccgatgcaggcgggcgtttagggaaagaactgggtaaagcttccattgccgtcgtgacgggcagtcttacagaagaccttctcaaacaggctgagcccggccgtgctgacatgacggtgtttttggcgaaagaaacgaatgccgcgctttcggagaaagaacggaaactcgctctcatcttcgctcagaaaaatattaaggtgcaaatgatcagggacaaacgggtgtcccatgttgtttagaaagagaggtggcgcgccatgccgcatgacgagaaccagggaagcaggctgagtctgctgctgttttattttctcgcttttttattgttatgggaatggctcaggccgctgcacaattttacggatacaaaacataccggttttttcatcgtttttatcggtttggcatttctgctgtcattcttccggatgaggtggtacgtgaccgtgccgtcctgcattctgtttacgttgatcagtattcacatcctgttttataaaggttctatttttcagccggaatggctcgtttcttttttgcgggacgtgatgcaaaatgcccgccacatcggaaccggaagatggaatgatatgaatccgtcattccgcacgttgctgttttttgtgcttttatggctgctcgtgtatttgctgcattactgggtgatctatcagcggaaaatattattcttttttatcatgacggtggcgtatatcaccgtgcttgatacgtttactccttatgatgccgcgtacgccgtcatccggatcgtctttatcggctttttgatgatggggcttttgtatatggagcgcatccggcttacggaacacatagcgtttaaaaaaagattgatactcaaatggtttctgccgctgatgctgtttatctgcgcttccgtagtgttcggtctggcggctccgaaatcagacccgaactggccggatcccgtgccgtttctaaaaaaaatcacaaaccacaaagaagtgcccgccgccgaaagtaaaatcggctacggcaatcatgatgaaacattgggcggtccttttcaggaggatgatacgccggtttttacatggaagggaaaagaacgggcgtacttccgggtggaaacgaaagatacatacacggggaaaggctgggtggagaccgatcagggcatgtcctataaactgaacggcggcaatgtggaagatatatggtttgaccggagtgtgcagacgagacggtatacggcacaggtgtccattgatgagaattatctctataatcacgtcatgtatccgatcggcgtctccaatattaaaccgaagcactcgattcagcttgaaatgaacggaaacaccgagcaaattacgccggtcagtgaacaagtgggcaacatccgcaatatgggacggtacacggtgacttttcaggcgcccgtctttaagctgaatgatctcagaaaagtgaaagtgaaacgataccgtgagcagaatcaattcaatgaccggtatttacaggtccccgacagccttccgggaagagtgcgacagcttgcggacagattgacgcgggatcatcataatatgttcgataaagcgaaggcgatcgaggattatctcggatcttccgcattttcgtataatacacaggatgtcgcggttccggagcacaatcaggattatgtcgatcaatttctgtttgaaacgaaaagaggatattgtgataacttttcatcggcaatggccgtgctgctccgctctgcgggaattcccgcccgctgggtgaagggctatacatccggtgaatataaaggggcaggcgaccataacggccacatttatgaagtcacaaacaacaacgcccattcgtgggtagaagtgtattttcccgatcagggctgggtgacgtttgagccgacaaaaggcttcaccaatccgacggagtttacgtcagagcaaaatcataccgcggcaaaagacagcggaggctcagcggggaattcggattcaccgtctgacaagcagcgtcaggaaacaaagccggaaaaagaagaaacaccgaaaaagcgggatcacagcgcggcaccgcagcctgtgatccgcaacaaaaccgcggcacacctgtggccgtatgcagccatcgtcatcgtaatttcagccgcggcggcactcgcctggctgttccgggtgcgctggattccgcacgttacagcagccggattgaagcggcgaacggatgaagacgtctttttcgacgcatatgccgcgctgctccgccagctgaaacgaaaagggttcagcaggggagacggagaaacgctccgcgattttgccgcaagggttgatgaggcgcaccatacaaacgacatgtccgagctgacgctgcgctatgagcgtgctttataccgcagcgataatgccgcaaagctttggaatgaatcgggacagttgtgggaaaatataattaaaagaagatagtcttgaccgcatatcgtcctgttgttagaatatatgaatgttaaatgggagcccgggagcgttaaaaagccgggcttccggacaagtcttgccgacagagggctgaacgtgtgtcctccgttttttctgtgtcaaaaacttagaggagattaggtgacaaccatgacgaagttagtgaatgaaatgattcttgttcttgatttcggcagtcagtataaccagctgattacccgccggatccgtgaatttggcgtatatagcgagctgcatccccatacgttgacagctgaggaaatcaaagaaatgaatccaaaaggaattatcctttcaggcggaccgaacagtgtatatgatgaaggatctttccgctgtgatgaaaaaatctttgaactcgatattcctgtattgggcatctgctacggcatgcagctgatgactcattacctcggagggaaagtcgaggcggcaagccagcgcgaatacggaaaagcgaacattcagattcaaggaactccagacttgttcaaggatcttccggaagaacaagttgtctggatgagccacggcgacttagtcgtacaagtgccggaaggatttacggtagacgcgacgagccatcactgcccgaactcggcgatgagcaaaaaagacaaaaaatggtacggtgtgcagttccatccggaagtccgtcattcagaatacggaaatgaccttctgaaaaactttgtcttcgggccttgtgaatgtaaaggcgaatggtcaatggaaaactttatcgaaatcgaaatgcaaaaaatccgcgaaacagtcggagacaagcaggttctttgcgcgctaagcggcggtgttgattcctctgttgtggctgctttaattcataaagcgatcggcgaccagctgacttgtattttcgtcgatcacggcctgcttcgtaaaggcgaagctgaaggcgtcatgaaaacgttcagcgaaggctttaatatgaatgtcattaaagttgatgcgaaagacagattcttaaacaagctgaaaggtgtttctgatcctgagcaaaaacgcaaaatcatcggcaacgaattcatttacgtatttgatgatgaagcggacaagctgaaaggcatcgattaccttgcgcaaggaacgctttacacggatattatcgagagcggtactgcaacggcgcaaacgatcaaatcgcatcacaatgtcggcggacttcctgaagatatgcagtttgaactgatcgagccgctgaacacccttttcaaagacgaagtgcgcgcgcttggcacagagctcggccttccggatgatatcgtatggcgtcagccgttcccgggccctggacttggcatccgcgtactcggtgaagtaacggaagaaaaacttgaaatcgttcgtgaatcagacgcgattctgcgtgaagaagtggcgaaccacggccttgagcgcgacatctggcagtacttcacggttcttcctgacatccgcagcgtcggcgtcatgggagatgcgagaacgtatgattacacaatcggtatccgtgccgtaacatcaattgacggcatgacatctgactgggcgcgtatcccttgggatgtgcttgaagtgatttcaacacggatcgtcaacgaagtgaaacacatcaaccgcgtcgtgtatgacattacgagcaagccgcctgcaacgattgagtgggaataaatgaagataaaaaacgtctcttttaaaaaagaggcgttttttttcatctttttgaaaccgttttgccccgattcatatctaacagcataggaggtggataaggtgaaggaagaacgattgatcaaaaaggcgaaaaaaggtgatgccgcagcctttgaaaaactgatcacaacccatcaggagactttatataaaacagcttatctttatttgcatcacaaggaagatacactggacgctgttcaggaaacggcttacaaggcttttcttcatatcgcacagctgaaggagccgaaatattttaaaacgtggctgatccggattctgcttcatacgatttttgcgatgaggaaaaagcacggagacgtcattccgtttgagccgcagcacgatacgcgcgcggagaataagaatattgaagaatacatagatcttcggaatgctctggaaacgcttgacgaacatatacagctgaccattcagctttattattttcaagatttctcgattggtatgatcgctgaacagaccggtatggcggaaggcactgtaaaaacgcatctctacagggcgagaaaagcattgaagcaggaactggaaaaggaggataaacacatatggaaaagcatcaaatgaagcaattgtatcaggacattgacgtgccgaaagctgagttgaaaaacgtgatacacagcgctgctgtccgtgccggaaaagaaggcgccgtcagacggagatggggacgaaaagtgataaacggcctcgcggttgctgctgctctgtttattctgtatctgtcctcaggcttgttcatgccctccgttaacaccgctatgggaaacattcctgttgccggacaaatttacagtctgtttcaggataaggcaggttctgcgctgtttaaaagcaatttggtgacaaaactgaacgaaaaagcggaatcacgcggaatcacggtgacagtgaaaagtgtgtattacgacagcggacagctcgtttataactttatcgttgataatttgaaatcagatgaggagagcatctcttttcaagtcgattataaagatccacggaatatgttagcagaggattatgacagcagtgatatgaaaaaaatgaaagacgggcggtacgcggggcagcttcgcctgttcacggacggctcaaagctgaaagacggtgataagcttccgcttgtcattacacaaatcaaggatatccccggaaactggcgctttacactccctattaaaaaacaaaagtccgtttctcttgaaggaacgaaagctgtgaatgtaaatcacggattataccgctttttcgatatccgggcggaaaacggaacgatgggatcggctctcctgtattctatcgacttctatgatgcagccaaaaatgatgccatctcgattgacgaagcaacggatgatgctggaaaccattatgaaatgacgatgtcgaatattgaacttggcggcaggaagaatcttcccggcggcgggaaaagaatacgcggccaaactcaattcagcaaaccgatagacccgaaagcgaaaacacttttcataacgggtgatataaaaacagaatcagagccgggagaaatcgtgcctctgaaaacaaaactgcccgtcagttataaaacgaaacatcatcatgtcggcattaccatcaaaaagatcaaacagcaagacagacgggtgatcgtcgattatcaattcacaggaattaattacagcaaagcggataaagatcagctgatgaatgtcggtgaatcaatcggtctcggcaatacgaaaaaaatgaaaacttggccatcgcttaatgagtatgaaaaaggctattatctgaaagggaataaggcgaaagtcacgaatcttaaaaagggtgaaatggaatccgtttttgaattagatgattcatccgataaagactattcattgcgcgatttctcattcgattcatatgctttgtacgtcaatcaaacggttatgaacttgctggcggatgacaaggggatcacattcgcggtgccggttcggcctgcgaacggaaaatgatgccgggaaggcggcccttgccgtcttccatttttggtcaattaacgaataaaccaattttttttaactggattgttcgtttttttattgagttttcaaaattgaattgatacaatagactcagaaatcaaatatgcagatatcgtataatggcggggatatggcccgcaagtttctaccaagctaccgtaaatggcttgactacggatcaatctcaatcgtttgatataaataatccattcttatttattcagactgaacgtatgtagtcaagcgtcccaaatgtatttggggcgttttttatttggcggataacgggcagaataaatgggagagaatgaaggaggcaattggcttgaagcaattttttcagtttgatgagctggggacaagctatcgtaatgaaatcatcggcggtttaacgacctttttgtcaatggcgtacattctgttcgtcaatccgctgacattgtctttaaacggtgtgaaaggatttcccgaagcattaaaaattgatcagggcgcggtgttcaccgctacagccttggcatctgcggccggctgtattttaatggggcttattgcaaagtatccgatcgcgattgcgccgggtatgggattaaatgcgttttttgccttctctgtcgtactcggcatggggatttcatggcaggctgcgctttccggcgtcttgatttccggaattatcttcgtggcgctttcactgacgggattgcgggaaaaaatcattaatgcgattccgcctgagctgaaattggcggtcggcgcgggtatcggtttgtttatcacatttgtcggtttgcagggttcgggcattattgaagcgaactcatcgactttggtgtctatcggcaatattcacagcggccctgtgctgctgacggttttcggtgttattgtgacggtcattctgatggtgcttcgcgtaaacggcggcgtgtttatcggaatgcttttgacggcggttgccggtatgatctgcgggctgattccggttccgacacacattgtcggcagcgtgccgagtcttgcgccgactttcggacaggcgtggatgcaccttccggatatcttctccgtacaaatgctgattgtcattttaactttcctgttcgtcggatttttcgatacggccggtacgctggtagctgtagcgacacaggccgggctgatgaaggaaaacaaacttccgcgtgcgggaagagcgcttttggcggattcaacatcaatcgttatcggagccgtgctcggtacgtctacaacgacttcttatgttgaatccagctcaggcgttgcggcgggggcgcgctccggcttcgcggctgttgtgacgggcattctctttttgctggcgatgtttttctcgccgcttctgtcagttgtcaccacgaatgtgacggctccggctttaattatcgtcggcgcgctgatggtggcgccgctcggtaagatcgcctgggataaattcgaggtggctgttccggcatttttaacgatgattatgatgccgctgacgtacagtattgcgacggggattgcgatcggttttattttctacccgattacaatgatctgcaaaggaaaaggaaaaagcgttcacccgattatgtacgggctgttcgtcatctttatcctgtatttcatcttcttgaaataacggaaaaaccggctggggaaagccggttttttgtttttgtcctattccgtaaaaccaatacataatataaaacgtcatgtgggtgtccgggtgaagaaaaccgcttgactgtttaaggccgcttcggtaccttatataagtgttttattttcttgctaaacaaattccgccgtatttttttgataggagttgctgacatgacggaagaaagaaaagaaacgttggaagaagaaaaacagcatcagggaactgatgaagaaccgctgtcgagaatgtccagaaatgcgggacgttatcaaaagcaaaagaaaaaagaaaaggaacggcgcccggctccggcttttacggaaaaactcgcttctgcatgggccgcggtcaaacgttattgccgtttcgcgctgcgcattttgacatcaccggtgaaggtcgttggggaagacggcttttcccgctttaaatatgctcttatttcaatgcttgtattcagtatctttttctcaatcggaaattggtttcagctgagggcaagccagcaaaggcctctcggatacggggagcggcatcatacgttttttgacggctttaccgtcgttctcgtgtatacgctcgtcttttttgccgctgcggccggcgcggtctggcttgtatcacgttatatgatgaagcagaaaattacgatgcgggatgcggccgcgggggtcggatcgcttttggttccggctgtcgcctgctctatcgtgtggatgattttcgcgatattgaatctgccggtcatcaccgtggtgtttacggcgctgaccttgtttctggccgcctcggcgatggtgcagtttgtgcagattctatacaaatcggctgaaaagcctgcggctgacgtgatgtactgtatttccgcggcggtcatcatcatgctcgtttttacggctgtgacatggccgctcatttccgagtactttactgcttcgctgattcctttataagtcgaaatttgtctttcacaatgtttacaaatttttctaatgaagcgtgttgttttgaggacccggccgagatatgatgagagcaacagcaattcgaaagcggcactactctttatgattcggaaagggatgatgaagatggccccgttgttgcgagaagccattaatcggaaaaaacagcacctgaggacaaaactgatccgctcagggttttatcaagaccatgttcaggaactgtccgggtacacgctgagtgaacttgagaaggaatatgaagccgtcaaacgattgaaaaaagccgagcttcactgataagagcttgagagtctgccttgcggggcgggcttttttttcttttgaaaatgatgaaaagagggtaaactatccttaattgaaagattggcttttcaaagtcagaggaggggaatcagtgatgcagacaattttatccaacagtataggtatggttctcattattctcatcattaacattatatatgtctctttctttacgatcaggatgattctgacattaaagggacagcgctatttcgccgcaggcatcagtacaattgaaatccttgtgtatgtgaccggcctgagtcttgtgctcgacaatctgaatcaaattcaaaacgtcattgcctatgcgctcggctacggcctcggcgtcatagtgggaatgaaaattgaagaaaaactggcgctcggctacataacagtcaacgtcattacgaaggagctcgatctggacctgccgaaacagctccgggaaaaaggatacggtgttacaagctgggttgcgggcggacttgaaggagaccggaccgccatgcagattctgacgccgcgcaaatatgagcttcagctgtatgatacgattaaaacgcttgatgaaaaagcgtttatcatcgcctttgagccgaaaacgatccacggcggattctgggtgaaagcagtgaagaagaggagaattaaggaatgacaaagccaaaaaagaaacggtttgaagtaacggaacatgaaacgattgacaccattctcactttaatgaaggaagagggttatatgcccgtccggcggatggaagagccgatctttacagaaaagaaagaaaatggatcaattcaagtcgttccttgcgggaaaaaaatcgtatttgaagggaaattgatctaaacacgaacattaaaagaaagaatttttatatcgttcgataatgtcgttgacattatccaagtccgttgttaagataaacatgaaatcaaaacacgacctcatataatcttgggaatatggcccataagtttctacccggctgccgtaaacggccggactatgcaggaaagtgataaacagctgacatggatatcgcagaagcgaacgactgacgatacgcgcgccatgcccggtttgtattgcttcctcatagttgcaatataagccgggcttttttttctgaaaaacaaagcatgagaaggtgggaacagaatgcagccgctagcaggaatcatcatgggaagcacctccgattgggagacaatgaaacatgcatgcgacatacttgacgaacttcacattccttatgaaaaacaggtagtatccgcgcatcggacgcctgatttgatgtttgaatatgcagaaagcgccagagacagaggcttaaaagtcattattgccggagccggtggagcggcgcatctgccgggtatgacggcggccaaaacgacactgccggtgatcggcgtaccggttcagacaaaatcgcttaacgggcttgattctcttctgtctatcgtacagatgcccggcggcgtgccggtcgcgacaacggcgatcggaaaagcgggcgcagtgaacgcgggtctgttagccgcgcagattttgtcggcatttgacggtgacattgcggataaactagaggcgagaagaaatgcgacaaaacaaacggtgctggaaagcagtgatcagcttgtctgataaaaaaacgatttatcccggcgccgtcatcggcattatcggaggcggacagctcggaaaaatgatggctgtcgccgcaaaacagatgggctataaagtcgcagtcgtcgatcccgtgaaagactcgccatgcggacagatcgccgatattgagattaccgcccagtacaatgaccgtgaagcgattcaaaaattggccggagtcagtgacatcattacgtacgaatttgaaaatatcgattacgaggcgctcaactggctcaaagaacatgcatatcttccccagggaagcgagctgctgcttatcacccaaaacagggaaacggaaaaaaaggcgatccagtcagcaggctgtcaagtcgctccttatcggatcgtaaacagcggacgggagcttgaggaagctgttcaggcactggggctcccggcggtgctgaaaacatgccgcggcggatatgacggcaaaggccaatttgtcattaaggaagaaggacagacagacgaagcggccgcgctgctagaaaacggcacgtgcatactggaaagctgggtatcgttccggatggagctttccgttatcgtgacgagatcggtgcacggtgagatttcaacctttccggctgctgaaaatatccacaaaaataatattctgttccaaagcatcgtgcccgcgagagcggaggaaacggttcaaaagcgggcagaggcgcttgccgtccagctcgcggagaaattggagcttgtcgggccgcttgcggtggaaatgttcgtcacagaagacggagaccttttgatcaatgaactggcgccgcgtcctcacaactccgggcattatacgctcgacctttgtgaaacgagccaattcgaacagcacatcagagcggtctgcggacttcctctcggcagaaccgatcttctcaaaccgggaatgatggtgaatctgctcggtgaggaagtgaagcttgcggaggagcatacggagcttttaaaagaagccaaactgtacctgtacggaaaacatgagattaaaaaagggcgcaaaatggggcatatgacatttttgcggaagcctgatgaaacatggattcaggacatcacgaacatatggatgaaaagagacggaggacgagcataatgatcgaacgttattcaagacctgaaatgtccgcgatctggacggacgaaaacagataccaggcatggctggaagtcgagattttagcctgtgaagcctgggctgagcttggcgtcattccgaaagaagacgtcaaggtcatgcgcgaaaacgcgtcttttgacatcaaccggattttggaaatcgagcaggatacgcgccatgacgtcgttgcatttacccgcgcggtttcagaatcattaggcgaagaaagaaaatgggtccactacggcctgacgtcaacagatgtcgtggataccgctctttcctatctattaaaacaggcgaatgagatcttgctcaaggacattgagagatttgttgacattataaaagaaaaagcgaaagaacataaatacacggtcatgatgggccgcacgcacggcgtacacgcggaaccgacgactttcggcctgaagctcgcgctttggcacgaagaaatgaaacgcaaccttgaacgtttcaagcaggcaaaagaagggatcgaagtcggcaagctttccggcgcggtcggcacatatgcaaatattgatccgttcgtagagcagtatgtctgtgaaaaactcgggctgaaagcggcgccgatttccactcagacattacagcgcgaccgtcatgcggattacatggcggcactggctttgatcgcgacgagcattgaaaaattcgcagtggaaatccgcggtctccaaaagagtgaaacacgtgaagtggaagagttttttgctaaaggacaaaaaggctcatcggctatgcctcataaacggaatccgatcgggtcggaaaatatgacgggcatggcgcgcgtgatccgcgggtacatgctgacggcatacgaaaatgtaccgttatggcatgagcgtgatatttctcattcatcagctgagcgcatcattcttcctgacgcgacaatcgcgctgaattacatgctgaaccgattcagcaacatcgtcaaaaacttaacggtattcccggaaaatatgaaacgcaacatggaccgcacactcggtttaatctattctcagcgcgtgctgcttgctttaatcgacacgggtctgcctcgtgaagaagcatatgacacggttcagccgaaagcgatggaagcgtgggaaaaacaagtgccgttccgccagcttgtcgaagcggaggaaaaaatcacgtcccgcctcacaccggaacagattgccgattgctttgactacaattatcatctgaaaaacgtcgacttgatctttgagcgtttaggtttatagaagaagccagccggaggcggcttcttcagccgccgtagattgaatattcccaacattcgggttaggaggccttccgtgaatattgtgaacaataatcttctttatgaaggaaaagcgaagcgaatttatcaaactgaagacgaacagattctccgcgtggtctacaaggattccgcaacagcctttaacggtgagaaaaaagcggagatcagcggaaagggccgtctgaacaatgaaatttcaagcctgattttcaaacatctgcacgccaaaggaattgacaaccactttgtggagcgtgtttcagaatcagagcagctcatcaaaaaagtgagcatcattccgcttgaagtcgtggtcagaaacattgccgccggaagcatgtcgaaacgtctcggcatcccggaaggaacagagctcccgcagccgattatcgaattttactacaaggatgacgcactcggcgatccgctcatcacagaagatcatatccggctcttaaaagcggcggctcctgagcatgtcgaaacgatcaaatcgattacaaaccaggtgaatcaagaacttcagcatatttttgaagactgcggggtcagattaatagattttaagctggaattcggcttagacgcagagggacgggtgcttttagcggatgaaatttctcctgacacgtgccgtctgtgggacaaagacacaaacgaaaagctcgataaagatttgttcagacggaacctggggagcttaaccgacgcatacgaagagattttcaaaagactgggaggcatttcataatgtataaagtgaaagtttatgtcagcttaaaagaaagtgtgctcgatcctcaaggaagcgcagtgcagcatgcattgcacagcatgacctacaatgaagtgcaggatgtgcgcatcggaaaatacatggagctgacgatcgaaaaatctgaccgcgatcttgacgcgctcgtgaaagaaatgtgtgaaaagctccttgccaatacagtcattgaagactaccgatatgaagttgaggaggttgtcgcacagtgaaatttgcggtgattgtgttacccggctccaactgtgatattgatatgtttcacgccgtaaaggacgaactcggcgaagaagtcgagtatgtctggcacgaggaaacaagccttgacggatttgacggcgtgctcatccccggcgggttttcatacggcgactacttgagatgcggcgccatcgccagattcgcaaacatcatgccggccgtgaaaaaagcggctgccgaaggaaaaccggttctcggcgtctgcaacggattccagattctgcaggagctcggacttctgcccggcgccatgagacgcaacaaagatttaaagttcatctgccgcccggttgaattaatcgtacagaacggcgatacgttattcacatcttcctatgaaaaaggacaatcgattacgattccggttgcccacggcgaaggcaatttctactgtgatgacgaaacgcttgaaagattaaaagaaaacaatcaaatcgtcttcacatacggcggcgatattaacggaagcgtcagcggcattgccggcgtcgtgaatgagaaaggcaacgtattaggcatgatgcctcaccctgagcgcgcagtcgatgaactgctcggcagcgcagacggtcttacattgttccggtctatcgtgaaaaattggagggaaactcatgtcgctactgcttgaaccaagtaaagaacaaataaaagaagagaaactctatcagcaaatgggtgtcagtgatgacgagttcgcactcattgaatctattatcggaagattgccgaactacacggaaatcgggattttttccgtgatgtggtcagagcactgcagctataaaaactcaaaaccggttttacgcaaattcccgactagcggcgaacgcgtgctgcagggtcccggagaaggcgcgggaatcgttgacatcggtgacaatcaggcggtcgtgttcaaaattgaatctcataaccacccgtcagcgcttgagccataccaaggtgctgcgacgggagtgggcggcattatccgtgacgttttctcaatgggcgcccgtccgatagctgtattaaactctcttcgatttggtgaactcacttcacctcgtgtgaagtacttgtttgaagaagtagtggcgggaatcgcgggatacggaaactgtatcggcatcccgacggtcggcggagaagtgcagtttgacgcaagctatgagggcaatccgcttgtcaatgcaatgtgcgtcggcttgattgatcataaagatattaaaaaaggccaggcgaaaggtgtcggcaacacggtcatgtacgtcggcgctaaaacgggccgcgacggcatacacggcgctactttcgcatcagaagaaatgtcagattcatctgaagaaaaacgttccgcggtgcaggtcggcgatcctttcatggaaaaacttctcctggaagcatgccttgaagtcatccaatgcgacgccttagtcggcattcaggatatgggggcggccggtctgacaagttcgagtgctgaaatggcaagcaaagccggctccggcattgaaatgaaccttgatctcattccgcagcgggaaacgggtatgaccgcttacgaaatgatgctttccgagtctcaggaacgcatgcttctcgtcattgaacgcggacgtgaacaggaaattgtcgatatttttgataaatatgaccttgaagcggtttccgtaggtcatgtgacggatgataaaatgctccgcctccgccataacggagaggttgtttgcgaacttccggtcgacgcactggcggaagaagcgcctgtataccacaaaccgtcagcagaacccgcgtactaccgcgagtttcaggaaacagaagttcccgcgcctgaagtaaaagatgggacagagacgctttttgccctgctgcagcagccgacaattgccagcaaagagtgggtgtatgatcaatatgactacatggtgcgcacaaatacggtggtcgctccgggctctgacgcgggagtgctcagaatccgcggcacgaaaaaagcgctggcgatgacgacggattgcaacgcccgttatttatatcttgatccagaagaaggcggaaaaatcgccgttgccgaagcggcgcgcaacatcgtatgctccggcgccgaaccgcttgcggtcacggataatctgaatttcggaaacccggaaaaacctgaaattttctggcagatcgaaaaagcggccgacggcatcagcgaggcgtgcaatgttctcagcacacccgtcatcggcggtaacgtatcactttataatgaatcgaacggaacggctatctacccgacgcctgttatcggcatggtcggcttaattgaagataccgctcatattacgacacagcatttcaaacaagcgggggatcttgtatacgtgatcggcgaaacaaaacctgagtttgccggaagcgaactgcaaaaaatgacagaaggccgcatttacggcaaagcgccgcaaatcgatcttgatatagagctgtcacgccaaaaagcattgcttgacgcgattaaaaaaggcttcgttcaatccgcgcatgacgtatctgaaggcggcttaggcgtagcgattgcagaaagtgtcatgacgacggaaaaccttggcgccaacgtgactgttgaaggggaagcggcattattattctctgaatctcaatcccgcttcgtcgtttcggtcaaaaaagaacaccaagcggcgtttgaagcggctgcggctgatgcggttcatatcggtgaggtaacggctgacggacttctggcgattcaaaaccaggacggacaacaattggttcacgcgcaaacgaaagaacttgagcgcgcgtggaaaggagctattccatgcttgctgaaatcaaaggcctgaatgaagaatgcggtgtgtttggcatctggggacatgaagaagccccgcaaattacgtattacggtctccacagcctccagcacagaggacaggaaggcgcgggaattgtcgcgactgacggcgaaaaactgacggcgcacaaaggccaagggctgatcactgaagtatttcaaaacggcgagctcagcaaagtaaagggaaaaggcgcgatcgggcatgttcgttacgcaacggctggaggaggcggatatgaaaatgttcagccgctcctgttccgttcgcaaaacaacggcagcctcgcgctcgcccataacggaaacctggtcaacgccacacagctgaagcagcagcttgaaaaccaagggagcatttttcagacttcctccgatacggaagtgctggctcatctgattaaacgcagcggacacttttcgctgaaggatcaaatcaaaaattcgctatctatgctgaaaggcgcttatgcctttttaatcatgactgaaacagagatgatcgtagcgcttgacccgaacggactcagaccgctgtcaatcggcatcatgggcgatgcttatgtggtcgcttcagaaacgtgcgcatttgatgttgtcggcgcaacgtaccttcgtgaggtagagccgggcgaaatgctgatcatcaacgatgaaggcttgaaatcagagcgtttttccatgaatatcaaccgttccatctgcagcatggagtacatttatttctcaagacctgacagcaatatcgacggcattaacgtgcacagcgcccggaaaaacctcgggaaaatgcttgcccgggagtccgcggttgaagcggatgtcgtcacaggcgtgcctgattccagtatttctgcggccatcggctatgccgaggcgacgggcatcccgtatgaactcggtctcattaaaaaccgttatgtcggcagaacgtttatccagccgtcacaggctctccgtgagcaaggcgtcagaatgaagctgtccgccgtccgcggtgttgtcgaaggaaaacgggtcgtcatggttgatgattccatcgtgcgcgggacgacaagccgccggattgtcacaatgctcagagaagcgggggcgacagaggtgcacgtcaagatcagttcaccgccgatcgctcatccgtgcttctacggtatcgacacatcaacccatgaggagctgatcgcttcttctcattccgtggaagaaatccgtcagatcatcggtgccgacacgctttctttcttaagtgtagacggattgttaaaaggagtcggccgaaaatttgaagacaccaattgcggacaatgcctcgcttgttttacgggcaaatatccgacggaaatttatcaggatacagtgcttcctcacgtaaaagaagcggtgctgacaaaataaaatgtgaaaatgacataaaggcagcgggaattcaggctgcctttctctttctgcctttttaggagaaacgaattgacaaggagtgatagggatgtctgatgcttataaaaatgccggagttgacatcgaagccggatacgaagccgtcaaacgaatgaaaaaacacgtggagcgcacgaaaaggctcggcgttatgggaagcctgggcggttttggcggaatgtttgatctgtcagagcttccgtatcaaaagcctgttttaatttccggaacagacggtgtcggcaccaaactgaaactcgcattttcaatggataagcatgacacgatcggcgtcgatgcggtcgcgatgtgtgtaaacgatgtgcttgcccagggagcggagccgctgtttttccttgattatttggcggtcggcaaggctgatccggtgaaaattgagcagatcgttcagggtgtggcggacggatgcgagcagtcaggatcagcgcttatcggcggtgagacggcggaaatgccggggctgtatacgtctgatgaatacgatattgcgggcttttcagtcggcgtcgcggaaaaagacgaaatcgtcaccggtgaacatatcgaagaggggcatctcttaatcggacttacttcaagcggccttcacagcaacggattttccctggtgagaaaagtgcttcttgatgacggcggacttgatttggatactgtctatgaaccgtttgcgcgtcctctcggcgaagaattgctggaaccgacgagaatatatgtgaagccggtgctcaaggcggtgaaaagcggtaaggtggacggcatggcgcatgtgacaggcggaggattcatcgagaatatcccgcggatgctgccggacggattgagcgcggaaattgatcacggatcatggccgatcccgccgatttttccgtttctgcaggagcacggcaagctgaaagaagaagaaatgttcaatgtctttaatatgggcatcggttttgtccttgccgttaaagaagaaaacctgacagacgtcatcggcacgcttgaagctcagggcgagaaggcttatctgatcggccgggtcaagcggggcgaaggcatttctttcggcggtgcggctctttcatgaaaaagtttgcggtatttgcttcaggaaacggatcgaacttcgaggccattgccaaacgcatgagagaagagaagtgggatgcggagctctcgcttctcgtgacggataagcctcaggcaaaggcggcggaaagggcggaggctttacatatcccgtcattcgcctttgaaccgtcatcttttgaaaacaaagcggcctttgaacgggccattattgaacagctgcgcctgcacggggcggaattaatcgttctcgccggctatatgagactgattggagatacgctgcttgaagcatacggaggacgcattattaatatacatccctcgcttcttccggcattccctgggattgacgctgtcggacaggcgtatcgggccggtgtgaaagtggcgggcattaccgttcattacgtcgacgaaggcatggacaccggaccgattatcgcgcaaaaagcattcgaaatacaggaaaacgatacgcttgaagacatagagcatacaatacacgagcttgagcacaaatggtatccgagcgttgtgaaacggctgctgggactaaataacagaggtgaaaaggcatgacaatcaaacgcgcactaatcagtgtttctgataaaacaaatctcgtacctttcgtaaaggaactgacagagctcggcgtcgaagtcatttcgaccggaggaacaaaaaaacttcttcaggaaaacggtgtggatgtcatcggcatttcagaagtgaccggatttcctgaaattatggacggacggttaaaaacactccatcctaatattcacggcggtctgcttgccgtaagagacaataaagagcatatggcgcagatcaatgaacacggcattgcaccgattgaccttgtggtcgtcaacctttatccgtttaaagaaacgatttcaaaagaagacgtaacatacgatgaagcgatagaaaacattgatatcggcggtcccggcatgctgcgcgccgcatcgaaaaaccatcaggatgtgacggtcatcacagatccggccgattacagctccgtgctcaatgagatgaaagaacacggcggcgtttcgctcaaaagaaaacgcgagcttgcggccaaagtattccgccataccgcggcatacgacgcattaatcgctgattacttaacacgcgaggccggtgagaaagaccctgagcaattcactgttacttttgagaaaaaacagtcgctccgctacggtgaaaaccctcaccaagaggcggttttctaccaaagcgcacttcctgtctccggttccatcgcagcggcaaaacagcttcacggcaaagagctttcttataacaatattaaggacgcggatgcggctgttcaaatcgtccgggaatttacagaacccgcagctgttgccgttaaacatatgaatccatgcggagtcggtacgggagcttcaattgaggaagcattcaataaagcgtatgaagctgataaaacctccattttcggcggcatcatcgcgctgaaccgtgaagttgatcaggcaacggctgaagcccttcacggcatctttttagaaatcattatcgccccttctttcagtgaagaagcgctgaacgtgctgacggcgaagaaaaaccttcgtctgctcacgcttgacgtgaccgcatcaggaaagaaagaaaaacagctgacttccgtacagggcggtcttttgattcaagatttagacgtccatggatttgatgacgccgacatcaccatcccgacaaaaagagagccgagcgagcaggaatgggaagatttgaagctggcctggaaagtcgtcaaacatgtgaaatccaacgcgatcgtccttgcaaaagaccatatgacggtcggtgtgggcgcaggacagatgaatcgcgtcggttcagccaaaatcgccattgagcaggccggagaaaaagcaaaaggcagcgcgctcggatcagacgcgtttttcccgatgccggatacagtcgaagaagccgcaaaagccggtgtcacggcgattatccagcccggcggatcggtccgcgatgaagattcgattaagaaagcggatgaatacggaatcgccatggtattcaccggcatcagacatttcaaacattaaggggggaacgaagcgtgaatgtattgattatcggaaaaggcggcagagagcatacattggcttggaaagcggcgcaaagcccgcttgttgacacggtgtacgccgcgcccggaaatgacggtatgacagactgcgcgacgctggtcaacattggagaaagcgatcatgccgcactcattgcgtttgcgaaagaacatcatgtcggcctgacgattatcggccccgaagttcctctgattgaagggatagccgacgagtttgaaaaagccggactgcttgttttcggaccgtctgaaaaagcggctattattgaaggaagcaaacagtttgccaaggatttaatgaaaaaatacggcattccgacggcggagtacgagacgtttacttcatttgaagaggcgaaagcatatgtacagcaaaaaggcgcgccgattgtcattaaagcggacgggcttgccgccggaaaaggtgtcacagtcgcgatgacggaagaagaagcgattgaatgcctgcacgattttcttgaggatgagaaattcggggaggcgagcgcatctgttgtcattgaagagtttctcgccggcgaagaattttctttaatggcgtttgtaaaaggggagaccgtctatccgatggtcatcgctcaagatcataaacgcgccttcgatggagacaaagggccgaatacgggcggaatgggagcctactcaccggtgccgcacatttccgatgatatcgtcagaagcgcagtcgaaacgattgtgaagccggcggcaaaagcaatggtgaaagaggggcgctccttcacgggcgtgctgtacgcggggctgattctgacggaagacggatcaaaggtcattgaattcaacgcgcgcttcggagatccggaaacacaggccgtcgtgccgagaatggaatcggacctcattcaggtgctcttagatcttctgcatgagaaagatgttgacctaagatggaaggatacggccgcggtcagcgttgtcctggcttctgaaggctatccggaaggctatgcgaaagggacgccgatcggcagtttgacgtccgctgaagacgggatcgccgtttttcatgccggaacgaaaaaagacggcggacaatttgttacgaacggcggccgggtcgccaatgtcacggcatttgctgagacatttgaagcggcgagggataaagtgtacagcgccgtttcggggctgacaaaacccggactgttttacagaagcgatatcggcgcccgtgcgctgaaagcatcgcagcgataaagaggaaacccccgcgtcttaaaagatgcgggttttcttctgaatgacgactaagattgtcatgcagtcttgaattctgtcccggcttttgtgatgccgggatcgccggcagattcttctcatactcgcgggacaggagaaaaaaataacaagccgaaacggcttgttatttttcttgctgatggctgtcatcctgattcattccggcttggaacatatatgtcaccggacagaagcggaggatgccggacgccgctttcatcgcgcccatcatcatacagaagagatgcatcttgcaccaaggttttctcgtgtattttgctgaagcggcagacaaaatggtgaggccgcaagtgatgcgcataacggcgtttaataaactgatattcggtttcatcatttcagctcccttagaaaaagtttttcattcatcttcaataatttgtaacgttttagccgtgcgataattgtgcggatgtgatacgatgggtctaatataagcgaaggagagtatgtgaatgtccgaacgtacctttaactggaaaaataaagacatcagatcacaggcggatgttgtagactcaaagctgcttccaacgctacttttacgggatgctctcgtattaaatccttttttaaaacaatggctgaaaaagaacgtctggatttacggagaccgaattgtatatgttggtcatgagcttcctgatgcagcagagcacattcataccataaattgtgaaggaaaatacattgtgccaggttacattgaaccgcatacacatccttttcaaatatataatccccaaacgctcgccgaatatgtgtctcaattcggaacaacgacgtttgttaatgataacttgttttttcttttgcacagcggtaaaaagaaagcgcttactatattggaagaactaaaaaaacagccggtgcaatatttctggtggtccagatatgatctgcagactgaagtgctgaatgaggaccagctcctttcttttgatgtccgcaagcaatggattgagcatccggatgtcattcaaggcggagaattgaccggatggccgcgcctcatggacggcgatgacttgatgcttcattgcatgcaggcgacaaagaaactgcgcaagcggatagaagggcattttcccggagcttctgaaaaaacactgacgaagatgaaactgttcggggctgattctgaccacgaggcgatgaatggcgacgaggtgatgagacggcttgaattgggttactatgtttcgctcagacattcatccatccgccctgatttgagaacgattttgcaggatctccatcaaaaaggcttccggcattatgatcatttcttttacacgacggatggagcgacgccgcatttttataaaggcggcatgacgaatgaattaatcaaaatcgctttggaggaaggggttccggcgattgacgcctacaatatggcctcctttaatatcgcgaaatattatcagatggatgactttctcggtgtgatcggtccgggccggcttgcttcattgaacattctcgatgacccgatgaatccggacccggtcacggtgatctccaaaggcatcctgctgagggaagacggccgaaatatgaatgcgtttacagaaacggattggaaaaagggcggtcttgtccctcttgagctttcatatgatatgacgatggatgatttacagttttcaatgccgatgggtgtgataatgcgcaacgccgtcattatggagccgtatatgattgcgattgataattctgttgaccagctttcttttgatcatgatgaatgctatctcacgcttctcgataagcatggaaaatggcgggtcaatacaatgctgaaaggttttgccgatcgggtgcagggctttgtcagttcctacacgacaaccggagatattatcgctgccggaaaaaataaagaagatatcctgctcgctttctcacggatgaaagaaatcggcggcggaatcgtgcttgccgaaaacgggaaggttcttcatgagattcccctcgctttaaacggttctgcatccgcggagaattatgaagaagtgcttgagaaagagcaaaaactgaggacgctgctggaggagcggggctaccgattctgcgatccgatctatacgctgctctttttgcagagcacacacctgccttatatccgcattacgccgagaggaatattcgacgtgatgaaaaaaactgtactctttccatcgataatgcgttaaaatataaaagcagggagccgacatatgaaaagatggaaaaccgtttgtatgctttgttttgcgtttttgctgcttgccgcctgccggcagaacaatgccgatcaggtgcagccgaaagaagcggaagctcctttaacggggctgaaaactgagcagaagcttgcagaacgccgtccgattgcagtcgcagtgaacaatcatccgaaggcgaggccccaatccgggctgtcaaaggcggatgttgtcatcgaagcgctcgcggagggccggattacgcggtttctcgcgatttttcaaagtgagatgccggaaacggtcgggcctgtgcggagcgcgagggaatattttgtcacgctcagcagcgggtttaacagcatatttgtccatcatggctggagtcccggcgctaaaaagcagctggagtccggaacttacgattatataaacggtttggattttgacggcagcctgttttggagagccgatttcagcaagccgccccacaattcctacacgtcgtatgacaatatcaggaaggcggcggaacaaaaaggatacaagctgaacggaaaaacagaaccgctcccatttcagacatcagatgcaaaacccggaaacgaaacctacaatattcggatagattatggaacacaaaacgttacaaatcttgtcgaatacgattatgataaaaaagctgatgcttatacaagaagctctgatggtgtgaaagcgacagaccgggagaccggaaagcctttagccatgcacaacatttttattgttgaagccggccatcgcatgacagacaaagatggaaggcgggccatcgatattcagtcagggggaagggcctcctgcttcagcacggcgatgttatggagtcagactgggaatataaagacggccgtattctgcccgtaaaaggcggtgagattcttccgtttgtgccaggaaagacatggattaatatcgtgcctgatctcgatgcagcttccattagtaaaggagaaggtgtttgacgatgcaaatcgataaattacgcggaaaagaactggaccagttatttttatctattttatcgctgaaagatctggaggaatgctatcgtttctttgacgatctttgtacgattaatgaaatccaatcgctggcgcagcgtttggaagtggcgagaatgctccgcgaaggaaatacgtatcacaaaattgaaagcgaaacgggtgcttccacagcgacgatttcccgggtgaagcgctgcttaaattacgggaacgacgcctatgaaatggcgcttgaccgcgtaaacaaaggagaatcctcctcagctacgtaaaaaaccgctctgccgatgacggcaggcggtttttttatgcgtgctgattcaaaaggccgggaagttccctcaggcttccgtcttcctcccggtatacgatgtgttcagctgagaaatgaatcggcgagctgatacccgccgccgcggcaagatgaaacagcccttcacgcaacgagagcacgtagttgcagacgcgatgctgtttatcctcgatactgagcgcgcgctgaagttttggatcggttgtcgccactccgacaggacaatgattggtgtggcatacttgagcgcggatacagccgactgaaaacatcattccccgggcaatattgacaaaatccgcgcctaacgcgagggcaacggcaatcttatcgggagtgagcagctttccggatgcgaaaattttcagcctatctcttataccgtatgtcttcaaaaggccgtcaacaagggggaggccggtcagaatcggcaggccgacggaatccgccagctcatggaaagaagctcccgttcccccttcactgccgtcaatcgtaataaagtcgggaagtttgcctgatgaactcatacaggaaataaggtcttcaaggtctttgcggctgcccgggacaattttgatgccgaccggtttttcaccgacagttcttaatttctcaatgaaatcaagcatgtccggaacatttgagaactcgttgaagcggtttggactgtcaatggattgtccgggctgcacatttctgatggcggcaatttcttcggtcacctttgaaccgtcaatatgaccgcctctagctttcgccccttgcgcaagctttaattcaaaggctttaatctgctcgaggcggctttttttcttaaattcttcccatgaaaattctccatcttcagtgcgcacgccgaacagcccggggccgatttggcagataatatccgcgccgcctttcaagtgatactcagacaggccgccttcgcctgtattcatccatgtgccgccggcctggtgcagcccttttgacagggcggtgattgcccggtcgccaagtgagccgtagctcatcgctgattgtccgattaacccttttacataaaacggtttcttgcatgtgtcgcggccgatcacttgcacatcgtccggatgcaggtaataagggtccgcttttgctttttcgcggtgttcgctgcgtttcagcaggttgtctttgtcaatcttgtataccatcgtgtcgatcttcggcgtctgatctgtgcgcagctcctccctttgtttcgggaagagggcgttacggatataatagcccggctgatcgaaatcccgttctgagccgaagcccatcattctgcttttatactttcccgacatgaccgtctgttcatattctctccgggaaaacggctgttcttcgttatcattgctgaataaatactgccgcagctcaggtccgattttttcaaatatatagcgcagttttcccgctgcgggataattgcgcagcactgaatgttcttcctgcttttcgtctcttatgtaaatccagagaaacaatgcggcgggaactaaaataataaaaatcaatatacaaatcagtacgataatggcttgttccattgagatcagactccttgccttttttctctttgacattccacattttgtctgttttcaaacatagccgtttcccgtccggcggagcgcaatctttttttgtgaatcaggtgaatgacgtctttttccgtttttccgggccaaacgaatttgttataatgtttaaatggcaagaaacgaatggaggaacgaaaacgcatgtacgatgttaacgagtggaagcatgtttttaaactcgatccgaataaagatttaccggatgaacagctggaacggctttgtgaatcagggactgacgccattgtgatcggaggaagcgacaatatcaccgaggacaatgtgctgagactgatgtcaaaggtgcggcggtttttagtgccgtgcgtacttgaggtgtcgacgattgattccattgtgcccgggtttgatctttatttcattccgagtgtgctcaacagcaaaaaggcggactggattgtcggcatgcatcatcaggcgatgaaagaatacggagagctcatgtcaatggaggaaatcgtgacggagggctactgcatcgtcaaccctgattgtaaggcggccgctttgacggaggcggatacacatatagaaacagaagatattctcgcctatgcgcgggtcgcggaacatttgcttcatctcccgattttttatctggaatacagcgggatgctggcggacatagaaacggtggagaaaacgaaggctgtgctggacaagtccgtcctgttttacggaggcggcattaaagacgcggaaacggcggaacggttcggccgtcatgccgatgtcatcgttgtcggaaatgccgtatatgaagattttgatcaggcgctcaaaacggtggcggctgtaaagacaaagtagccaagcggacgaaattgatttatgatagaacatatgtttgataggcggtgaacggatatgaattacattagcaatcaattattaagcggattaaatcccgttcagcaggaagcggtcaagacgacggacggtccgctgcttctgatggcgggcgcgggaagcggaaaaacacgtgtgctgacgcacagaatcgcatacttaatggcggaaaaacacgtggcgccatggaacattctggcgattacctttacaaataaagccgccagagaaatgaaggagcgggtggagagcattctcggacccggcgcggatgaaatctggatttccaccttccacagcatgtgcgtgcggattctgcgcagggatattgacagaatcggcatcaaccgaaacttctccattcttgatacggctgatcagctttccgttattaaagggattttgaaagagcggaatatcgatccgaaaaagtttgatccgagaagtattttaggctccatcagcagcgccaaaaacgagctgatcgaacctgaggaattcgcaaaaacggccggcggctactacgatcaggtcacgagtgacgtgtataccgattatcagaaaaaactgctgaaaaaccaatcgctcgattttgatgatttaatcatgacgacgattaagctttttgagcgtgtgccggaagtgcttgagttttatcagcgcaaattccagtacattcacgtagacgagtatcaggatacgaacagggcgcaatacctccttgtgaagcagcttgcggcccgtcttgaaaatatctgcgtcgtcggtgactccgaccagtccatttacagatggcgcggggcggatatcgcgaatatcctttcctttgaaaaagattacccgagcgcaaacgtgattctgctcgagcaaaactaccgctcaacaaagcggattctgcaggcggctaacgaagtgatcaaaaacaactcaaaccgcaagccgaaaaacctgtggacggaaaatgacgaaggcatcaagctttcttattacagcggcgacaatgaattcggcgaaggccaattcgtcgcgggcaaaatttatgagctgcacagctcgggccggcggaagctttccgatatcgcgattttataccggacaaacgcccagtcgcgcgtcatcgaggaaacccttttaaaatccggtctgaactacaatatcgtcggcggaaccaagttctacgacaggaaagaaattaaagacattcttgcatacctgcgccttgtgtcaaacccggacgacgacatcagttttacgcggatcgtcaatgtgccgaagcgtggcgtcggcgccacttcgctagaaaaaatcgcttcatatgcggcgatgaacggaatgtcaatgttccaggcgatcaaacaggttgatttcatcggtgtcagcgcgaaagcggcaaacgcgcttgacggctttggcgcgatgattgaaaatctgacgaacatgcaggattacctgtccattacggaactcacggaagaaattctcgaaaaaacggaatacagagaaatgctgaaggccgaaaaatcaatcgaagcccaaagccgccttgaaaatatcgacgagtttctttccgtgacgaaaaacttcgaacaaaaaagcgaagacaagtctctcgtcgcgtttctgaccgatctggcgctgatcgcggatattgaccagctcgaccagaaggaagaagaagcaggcggaaaggatgccgtcactttaatgacactgcacgccgctaaggggcttgaatttccagtcgtgttcttaatgggcatggaagaaggcgtgttcccgcacagccgctccctgatggaagaagccgagatggaagaagaacgcaggctcgcatatgtaggcattacgagggcggaagaagaactgtatttaacgaatgccaaaatgcgaaccttattcggccgcaccaatatgaatccggaatcccgctttatcagggaaatacctggcgatttattggagaacctaaatgagaagaaaacacctcgcatgcagccgggaagaaaagtgcagccgaaacgcgggcccgtatcccgtcccgtttcctatgcgaacaaaacaggcggcgactcgctcagctgggcggtcggcgataaagcgggccataaaaaatggggcaccggaacggttgtcagcgtaaaaggagaaggcgaaagcaccgagcttgatatcgcattcccgagcccagtcggcgtgaagcgtctgcttgccgcttttgcgccgattgaaaagcagtaacctgaagaggaaaggaagaacatgatggacaaagaaacagcgaaacaccgggcagaagaattgcgccgcaccatcgatcagtacagttatgaatattacaccttagatgaaccgagcgtgccggattccgagtacgacagactgatgcaggagctgattgccatagaggaagagcacccggaactcagaacgcctgattcgcccacacagcgggtcgggggagcggtgcttgaatcttttcaaaaggtgcagcacggcacgccgatgctcagtctcggcaacgcatttaacgatgatgatctccgcgattttgaccgccgcgtccgtcaggctgtcggtgacggcgtcgcttacaatgtggagctgaaaatagacggtcttgctgtttctctccgttatgaagacggctatttcgtcagaggcgcgacaagaggagacggaacgacgggcgaagatatcaccgaaaacttaaaaacgatccgcaacattccgctgaaaatgaaacgtaatctttccatagaagtgcgcggagaggcgtacatgccgaaacagtcatttgaagcgctcaatgaggaaaggctgaaacatgaagaggagccgttcgccaatccccggaacgcggctgcgggctcactcagacagctcgatccgaaaattgcagcgaaacgaaatcttgacatcttcgtctacagtatagcggagcttgacgagatgggtgtggaaacacagagtcagggcctggattttctggatgagctcggttttaaaacaaaccaggaacggaaaaaatgcgacacgatagatgaagtcattgaaatgatcgaagagctgcaggcgaagcgggccgatctcccttatgaaattgacggaatcgtcatcaaagtcgattcgctcgaccagcaggaagaactcgggtatacggcaaaaagcccgcgctgggcgattgcttacaaattcccggctgaagaggtcgtgacaaaactgctcgatatcgaactgaatgttggaagaacgggcgttattacgccgaccgccgttctggaaccggtaaaagtcgcgggaacgacggtctcaagagcatcccttcataacgaagatttaattaaagagaaggatatccgcattctcgataaagtggtcgtcaaaaaagcgggcgacatcatccctgaggtcgtcaatgtcttaattgaacagcggaccggggaagaaaaagaattcaatatgccgaccagctgccctgagtgcgaaagcgaacttgtccgcattgaaggggaagtcgcgctgcgctgcatcaatccggaatgtccggcgcagatcagagaaggcctgattcactttgtctcacgcaacgcgatgaatattgacggactcggagaacgtgtcatcacacagcttttccgtgaacatctcgtccgtaatgtcgctgatttgtataagctgacgaaagaacaggtcatccggcttgagcggatgggggaaaaatcaactgacaatctgatcagctccatccaaaagtcgaaagagaattcgctggaacgcctgctgttcggtctcggcatccgttttatcggctcaaaagcggccaaaacactggccatgcattttgaaagcctggaaaatctgaaacaagccacggaagaagagctgcttgcggtagatgaaatcggcgaaaagatggccgatgccgttatcacctatttccgcaaagaggaaatgcttgagcttttgaatgaacttgaggaactcggtgtgaacacactctacaaaggcccgaaaaaagtaaaagcagaggacagcgactcttattttgccggcaaaaccatcgtgttaaccggaaagcttgaagagctgtccagaaatgaagccaaggcgcagattgaagcgctcggcggaaagctgacgggatctgtcagcaaaaaaacagacttgctgattgccggagaagcggccggaagcaagctgacaaaagcgcaggaattaaacattgaagtatggaatgaagcacagctattgggagagctaaagaaataagaggagtgttttctattgaaaaagatgttggcattggcggcgacggcaacggcggcagtactcatgctgtcggcctgttcgccgagtttcgggggaaaaaaagaggaagagatcacgcagaaaacggcaaagtcttctgaaaaagcgatcataccgaaatataatatctctgattcctactataaaatggtgctcccgtttaaggccggaaaagcgcgcggcctgaccgcggaccggctgaacacgaggctggacatcgatgaattcgagactgggctgatgcggctcgctcaagacacgttcccgacggatgactatttgtatcaggaaggccagtatttagatgaggacacggttctcagctggcttgaccgcaaaaaagagggcagtgatctgaaaaaggcgaaaaaggcagacgccaatttccagaatctcggcttaaacccggtgctgccaagctcgggatcagcaaaagagaaaaacgaaaacagcccgatttacttagcgtccatgcttgagcaggattacttagtaagaaaagataaaaattccatccagcttggcggtgtcatgatcggtctcgctctcaactctgtatactattaccgcgaaaacacaggtgatccgcagcaggaagtggagctcagcgacaaaacgatccgcagccacggcgaagaaatcgcacaggaagtcgttaaccgccttcggaaaatggataacctgaaaaatgtgccgattaccgtcgccctttataaacaagcgccgaaaacatcaatcgtaccggggaattacattgcgaaaacagaagtcaaggccggctcatccaccatttcaaactgggatgatgtcaaagaaaagtacgtcttctatccggcggatacagacacggcaaagaaataccctgatgattccgaagtgtttaaacgcttcaaaaacgccatcgacagctacttcccgaattacaccggagttgtcggaacggcaatgtacgaaaacgatgaaatgagaaaaatgaagattgaaatcccgatgcaattttacgggaaaagtgaagtcatcgccttcacccaatacttaacaggtgagctgatggattattattcaaaaggctcagttgatgtcgaaattaacattacctcgtctgacgggcaggaagcgctgatcgtccgcaatgcgggtgacaaagaaccgaccgtccatatttacgattaaccaagatgcccttgttcatttctgtatgagcaagggttttttagtgtgaatatcgttggagagaggaatgaggtatgttaagatatttgtataattaggaattaacaggaaaacacatatcatttctaagcggatgttacgaatctgctgtgaaaaaagaagggcaggaatgttgatgaatgacatttgctgagtacacacaccgcctacaaatgttatgaaaagggtgaatcagcatgcataaagatattaaagcgatttttgaggaagataaggtgctggctgaagccggtgaaatatacggatttaccaagtttcaatttattgcggacgcagagaactacgtatatgaaattgtgaaagataacgaaccgtatatcttaaaaattacgcatacgatcagaagaacgccggaatatattctcggagaaatggaatggcttcatcatctggcaaaggaagggctttcagtagcaaagccgattccttcattaaatggcaaagatgtcgaagaagtgccggacggaaaaggcggagcgtttttattaagagtctatgaaaaagcgcccggacgcaaagtggaggaatcagactggaacggaactctgttttaccagcttggaaagtacacggggaacatgcaccggctgacgaaaagctaccgtctgagcgatccggcatataaaaggcaggaatgggatgaagaggagcagctgaagctgagaaaatacgtgcccgcagatcagcatctcgtatttgagcgggcggatgctctaatggaaaaactgcgccgtttgccgaagaatcctgaaaactacggccttgtgcacgccgatctgcatcatggcaattttaattgggacaacggaaaaatcactgcatttgattttgatgatatcggctacaattggtttgtgaatgatatcagtattctgctgtacaacatgttgtggtatccggtcatcccgtatgaagacaaggccgcgtttacgggtgaattcatgactcactttatgaaaggctacagggaagaaaatgaccttgattccgcatggtttgaacacatcccggatttcctccggctgcgccatatgctgatctacggattattgcatcaggcgtttgacctcaattcactcggggacgaggaactcgggatgctgaaagccttcaggcgcgatatcgaaaatgaaacaccgattacggagtatcaattttctgcattcgtataaatagaaaaacgccggctgaatccagcccggcgttttttataacgtatcacattttactccgacgacgccctgaatttctttaatatcataatagacgtcagtggtgtagcggtttttatgaacactgactttcacttccataatcggaaattctttttcacccaggtcatcaatccggacggagtgaatgcggagctgtttgcttttcatttcctttaaaatctcggtcattttgtctttatcggaaagagacattctcacgcggatatccttttccttcaagcgattgggaccgatttttctgatcagccacggaagaaattcgacactgatcaggataaacaagaggcttgcgaacgcctctttataaaagccggcgcctgtagccagacccagcccggccgcgccccagatgatagccgatgtcgtcaggccggatatgacgtcattgcttttacgcaggatcacgcccgcgccgataaaaccgacgccggaaatgatttgggcgggaaggcggagcggatccatcatgatacggtaatatttcgggaaatgatatgctgcattaatgctgacgatcgtcagcatacaggagctgacggcgatgacaatacaggttttcagtccgagcggtttgtttttcagttcgcgttcaagaccgatgatcatgccgatcagcgtggcaatgcccagctttaataaaatgtctggttcgataggccagctcaatttgcacagcacctccgcaatttttcttataataaattgatatgattttctcacagtatttatagcaggacaagtgcggaagaaaaaagccgtcagggataaaatctgacggctttttgtctatttcttgtttttcaaaagagcttccatccggctgaacagctgataagaagcatcggccggttttttggtcagcaggctgacggcaataccggcaatcagactgaggaagaaccccggaatgatttcgtatacgccggttgaagcggcaagccctgtcgtaatccagattaaaacggccgcggccccggtaatcatcgccgcaagcgctccccattcattcatccgtttccagtacagactgagcaagagcgcggggccgatagccgaaccgaagccagcccacgcatatccgaccagatcaagaatggtgctgttcggattcatggaaagcaggatggcgataacggccacgatcaataccgacaggcgtccggtcatgaccaattctttatcgctcgcttcccgtctgaaaaaggcgcggtataaatcttccgtaatggcgcttgccgttacgagaagctgtgaggaaatggaactcatgatcgccgctaaaatcgcggacagcaagaagcccgtaatcagcggatggaacaagattttagaaaaaataatgaaaatcgtttccggatcttttacggagaccccgaagtgatgagaatacgcaaccccgataatcccggtcagcaatgagccgacaactgaaataaacatccagctcatcccgattctgcgggcgggttttaaatctttcacttctttaatcgccataaatcgtacgatgatatgaggctggccgtaatagccgagtccccatgccaaataagaaataatgctaatgacgctcgcgcctttaaagatatccaatagtttcgggttaacggcgttgatcgaatcaatcgtcgttgaaacgctcccgagctgggtaaaagcaacgatcggcacaagcactaatgccgcaaacatgatcgctccctgtacaaagtcagtcagactgacagcgaggaaaccgccaaacagcgtataaagcacaactacacccgccgttaaaaacaaaccgaatttgtagtcggcgccgaatgccgattcaaataacctgcctccggataccatcccggacgatgtgtacagtgtgaaaaagatcataataatcacggcggaaacaattttcagcaatgatgacgagtggcggaatcgtttatcgaaaaaatcgggaatcgtaatcgcatcatccgcaacttccgtgtaagcgcgcagcctcggagcaagcagcagataatttgaatacgcgccgatcgtcaaaccgagcgccagccataaggtcgataaccccgttgcgaacattgcgccgggaactcccatcagcatccatgcgctcatatccgccgcacctgcggacagcgccgttacgaacggaccgagtcctcttccgcccagcatgtaatcattaatattcgttgtctttctgaatgcgtaccagccgattaacagcatggcggcaaagtaaatgccaagagatataattaattcaatactcacgtttttggaccctctcttctttcatgtaaatgttgcatcacctctgtagattagtagtgccggcgatccagcctgcctttagtcatctttcgatggggatcgcatgatttagtgccggctatggttactaaacctaacaaagtatccccgatcaatcaactctcgaaacctggcccgctcaaggaaaaaatccccgccaacctagaacagcttaaagaagaaagcgctaccaataaattataaaagtaaaaattttctgacatataattcgtttctctttctccccgatttaggataaaatagagagggtttcatcatgcctcagaaggcggcgttttgttgctttagagggctcgtttttgatatgatcagtattatatgacgaaacggagaattatgcggaggtggatcttatgtcacgaatttctatagaagaagtaaagcatgtcgctcatttggcgagactcgccattacggatgaagaagctgaaatgttcacagaacagcttgacagcatcatctcgtttgccgaggagcttaatgaagtggacacggataacgtggaaccgacaacacacgtgctgaaaatgaaaaacgtaatgagagaagatgaagcgggtaaaggccttccggtcgaggatgtcatgaaaaatgctcccgatcataaagacggctatgtccgtgtgccatctattctggattaaaggagggagacagtatgtcattatttgatcacaaaatcacagaactgaaacaaatgatacataaaaaagaaatcaagatttccgatcttgttgatgaatcttacaaacggatcgcatccgtggatgataaggtgcaggcgtttttacagcttgatgaagaaagagcccgcgcttacgcgaaagaacttgacgaagcggttgacggacggtctgaacacggtcttctcttcggaatgccgatcggcgtcaaagacaacatcgtgaccaaagggcttcgcacaacatgctcaagcaaaatcctcgaaaacttcgatccgatttacgatgcgacggttgtggaacgccttcaagccgctgaagccgtcacaatcgggaagctgaatatggacgagttcgcgatgggttcttctactgaaaactccgcgtacaaagcgacgaaaaacccttggaatctcgatacggttcccggcggatcaagcggcggttccgcagctgcggttgcagccggagaagtgccgttttcactcggatctgatacgggcggctccatccgtcagccggcttctttctgcggcgtcgtcggattaaagcctacatacggacgcgtgtcacgttacggtttggtcgcttttgcgtcttcacttgaccagatcggaccgatcacaagaaacgtagaagataacgcattcctgcttcaggcgatttcaggcccggacaaaatggactctacgagcgccaatgtcgaagtgccggactttctttcttcattaactggcgatattaaaggcttaaaaatcgccgtgccgaaagaatatctcggagaaggcgtcggcaaagaagcgaaagaatcggttttagccgctttaaaagtgcttgaagacctcggagcgacatgggaagaagtatctctgccgcacagcaaatacgcgcttgcaacgtattatctgctttcttcttccgaagcgtctgcaaaccttgcgcgctttgacggcatccgctacggctaccgctcagacaatgcggacaacctgatcgacctttataaacagacacgctcagaaggcttcggcaacgaagtaaagcgccgcatcatgctcggcaccttcgcgctcagctccggctactatgacgcgtattacaaaaaagcgcaaaaagtgcgcacgcttattaaaaaagattttgaagacgtatttgagaaatacgatgtcatcgtcggaccgacaacgccgacaccggcattcaaaatcggcgaaaaaaccagcgatccgctcacaatgtacgccaacgatattttaacgatccctgtcaacctcgcgggtgtgccgggaatcagcgtgccatgcggatttgcggacggactgccgctcggactgcaaatcatcggaaaacacttcgatgagagcactgtataccgcgtcgctcatgcttttgagcaggcaacagatcatcataaagcgaaacctgaactgtaaggggtgaaatgaagtgaactttgaaacggtaatcggacttgaagtccatgtggaattaaaaacaaaatctaaaattttctcaagctcaccgacgccattcggcgcggaagcgaatacccaaacaagcgtcatcgacctcggctatcccggcgtgctgcccgttttgaacaaagaagcggtcgaattcgcgatgaaagccgcaatggctttgaactgtgaaatcgcaacggatacgaagtttgaccgaaaaaactatttctacccggacaacccgaaggcatatcaaatatctcaatttgacaagccgatcggcgaaaacggctggattgaaatcgaagtcggcggaaaaacgaaaaaaatcggcattacccgtcttcaccttgaagaagatgcgggaaaactgacgcatacgggcgacggctattccctcgttgacttcaaccgccagggcacgccgcttgtcgagattgtatctgagccggatatccgcacacctgaggaagcttacgcatatctcgaaaagctgaaatcaattatccaatacacaggtgtttccgactgtaaaatggaagaaggttcactgcgctgtgacgccaacatttccctccgtccgatcggccaggagaaattcggcacaaaaacggagctgaaaaacctgaattccttcgcgttcgtgcaaaaaggacttgagcatgaagagaaacgccaagagcaggtgcttctgtcaggcggagtcattcagcaggagacgcgccgctacgatgaagcgacgaaaaaaaccattttgatgcgtgtcaaagaaggttcggacgactatcgttatttccctgagcctgaccttgtcgagctctacattgatgacgaatggaaagaacgcgtaagagcaaccattcctgagcttccggacgagcgccgcaagcgttatatcgaagagctcggtctgccggcctatgacgcaatggttctgacgctgacgaaagaaatggctgatttcttcgaagaaacggtcaataaaggcgcggaagccaagcaggcatcaaactggctgatgggtgaagtgtcagcttacctgaatgccgaacaaaaagagcttgaggatgtcgcactgactcctgaaggccttgccggcatgattaagctgattgaaaaaggaaccatctcgtccaaaatcgcgaagaaagtctttaaagaattaattgaaaaaggcggcgacgcagaaaaaatcgttaaagaaaaaggcctcgtgcagatttctgacgaaagcgtgcttctgaagctggtaacagatgcgcttgacagcaacccgcagtcaattgaagacttcaaaaacggaaaagaccgcgcgatcggcttccttgtcgggcagattatgaaagcctcaaaaggacaggccaacccgccgatggtcaacaagatcttacttgaagaaatcaaaaaacgataaaaaaagcagccgcctctaagggcgctgctgacacggagaccggtaagcgccggtctcttttttataagctgaaataggtttcaatggaagcccgcagcgtttcaatctgctcatttccgctgcctgccaagttggacagcattcctttaataatcggttttcgcggctcttcctttgcgtattcctcttcaatgacttcaagcgatacgaggacgtcctcaggcagcccctgctgtgcttttatcttttgaatatccgcaagcagtctttctctgtccgccgccggctgagtgaagatatcctgcggcagcagcggatcgggattgtctcttatcagtcccgtaatcaggtcatcgattctggcaatcagaaaggccgccacgttttccgtccggaatgccgtatgttcattaaaaatcaagaaatgaatataggagctcactattccttgcgccataacggacgcatccgctataaacggtatgacggcatctctgtaaacggagagcaaagcatcccggtacagtatgttaaattgaatattggcctcatgaaaatactgtttgaccttttgattttcaggaatgaccttttcgctcagcaagagaatgataaagtccttgtgctccataaattcctggaattgataagcgatttgttttcggaatacgtccttaggcgatttatgctgatgttctgttttgattttctttatttcttccatagacatgccgatgtaatactcacatgctgagagcaaaaggtcttcttttgatttaaaatgaagatagaaggccccttttgaaattccgcattcaccggcgatttcctgaatggttgttgaagaaaacccttttttggcaaataaatggatgcctgtttttatgattttctcttttttttcgttcatgacgtgcttccccttaatcctgaaaaatttagaaaaatttactgccttattagttgacgatgttgagttataccgtttagtattatatagaatgaccagtcagtcaataaaaattaacggaggacatgatgaaccacattattaactttgtactgaagaacaaattcgcagtttggctgatgacgattatcgttactgtagcagggctgtatgccggtctgaatatgaagcaggaatccataccggacgtcaacatgccttacctctcagtaaatacgacttatcccggagctgctccgagtcaagttgcggatgacgtgacaaaaccgatcgagcaggcggtgcagaatttagaaggagtgagcgtcgtaacgtccacatcctctgaaaacgtctcatcggttatgattgaatatgattacaacaaggatatggacaaggcgaaaaccgaagtcgctgaagcgctggacagtgtcagccttcctgatgacgcgaaaaaacctgacatttcccgttacagtctcaactctttcccgattttgacgctcagtgtgacaagcggcaaaagctcgcttgaagatctgactaaaaatgtggaaaacactctcgttcctaagcttgaaggcattcagggcgttgcgtccgtacaagtttccggacagcaggaagagcaggtggaattctctttcaaagataaaaaaatgaaagagtacggacttgatgaagataccgtcaagaaagtgatccaaggctctgacgtcaatacgccgcttggattgtacacattcggcaacaaagaaaaatcagttgtcgttaacggaaatattacgtcaattaaagatctgaaagagatgagaattccggtcacatcttcttctgccgctcaaggtcaagcgggcggagccggtgcggcatctgcggcggacgctcaggctatgcagcaggcacagcaaagcgcgtcagcaggggtgccgacagtcaagctctctgacattgccgacattaaagatgtgaaaaaagctgaatccatttcccgcacgaacggaaaggacagcatcggaattaatatcgtaaaagccaatgacgccaacacggtagaagtggccgatgcgattaaagatgaactgaatcaatacaaaaaagaccataaagggttcaagtacagctcgactcttgatatggcagagccgattacagagtcagtggatacgatgttaagcaaagcgattttcggcgcgatttttgcggtcgtgatcattctcttattcttaagagatattaaatcaacgatgatttctatcgtttccatcccgctgtcactgctgattgcacttcttgtgctgaatcagcttgatgtcacattgaacataatgacgctcggtgcgatgacggtcgccatcggacgggtagtcgacgactcgattgtcgtgatcgaaaacatttaccgccgcatgaggctgaaagatgaacctttacgcgggaagcaattggtgcgtgaagcgacaaaagaaatgtttaaaccgatcatgtcatcaacgatcgtaaccattgccgtattcctgccgcttgccatggtcggcggacagatcggcgaactgtttatgccgtttgccttaacaatcgtcttcgcgcttgccgcatcactgttgatttcgatcacactggtgccgatgcttgcgcacagcttattcaaaaaatcgctcacaggcgcacctgttaaagcgaaagagcataagccgggcagattggccaatttctataaaaaagtgctgaattggtcattaagccataaatggattacatctatcatcgcggttctgatgcttgtcggcagtttgttcctcgtacctctgatcggcgcgagctacctgcctgcgcaagcggacaaaacgatgcagctcacatacacgcctgaaccgggcgaaacgaaaagcgaagctgaaaaagctgcgcaaaaagcggaagatatgctgcttaaacgcaaacatgtcgatactgttcagtattctttaggatcgcaaagtccgctcggcggaagctcaaacggcgcattgttctacgtgaaatacgaggatgacacgcctgattttgacaaagaaaaagacaatgtcttaaaagaaatcaaaaaaacatcgagccgcggcgaatggaaatcacaaaatttcagttcgtcaggcaacaacaacgaattaacgtactatgtgtacggagattcagagtctgatattaaaggcacggtcaaagacatcgaaggcatcatgaaaaaggagaaggatctgaaagacgtcaactcaggcctttccagcacatatgatgagtacacgttcgtcgctgaccaggagaaactcagcaagcagggcctgacggcttcgcaaatctcccaagccctgatgtcccaaacgtcacagtctcctttgacaacggtgaaaaaagacggcaaagagcttgacgtcaacatcaaaacagaaaaagaccagtataagagtgtaaaagaattagaggataaaaccatcacatcacctgcaggccaagaagtgaaaatcggcgatgtggcgaaagtgaaaaacggcacgacatccgataccatttccaaacgcgacggcaaagtgtacgctgacgtaacggcaaccgtcacttctgacaacgtcacgaaggtgtcatcagccgttcaaaagaaagttgacaaactggataagccggacaatgtatcgattgataccggcggtgtatcagcggatattgcagattcctttacgaaactcgggttagcgatgcttgccgcaatcgccatcgtatacctcgttcttgtgatcacgttcggcggagcattagcgccgtttgcgattctgttctcgcttccgtttacagtcatcggcgcattagtcggactgtatgtatccggagagacggtcagtctgaatgccatgatcggtatgctgatgctgatcggaatcgtcgtcacaaacgcgattgtcttaattgaccgcgtcatccataaagaagcggaaggcctatcgacgagagaagcgctcctggaagccggctctacgagattgcgtccgattctgatgacggcgatcgcgacaatcggcgccctgcttccattggcattgggctttgaaggcggaagccaggtcatttctaaaggactcggtgtcaccgttatcggcggtttaatcagttcgactctgctgactcttctgattgtgccgatcgtatatgaagtattagcgaaattccgtaagaaaaaacctggaacggaagaagagtaagacagcgggccttggctccttaaacggagccggggccttttttcttctggcaattcctgtacatattgttgcgattttctcaagtcatagtataattaaaggttgttagtgttaataatggatcggatactcttaagtaggatgatgagataatgaaacgtgcacgcataatatacaatccgacttcaggacgggagcttttcaagaaaaatcttgcccaggtcctgcaaaaatttgaacaagccggttatgaaacctccacccatgccaccacatgcgcgggggatgccacccacgccgcaacagaagccgctttgcgggagtttgacctgattgtcgcagccggcggagacggaacgattaatgaagtcgtcaacggtcttgcgccgttagacaaacgcccgacactcggcatcattccggtcggcacgacaaatgatttcgccagagcgctgggcattccgagagagaatatactgaatgccgctgataccgtcattaacggcgtggcccgcccgatcgacatcggacaggtgaatggtcagtattttatcaacatcgccggcggaggccgtctgacggagctgacgtacgatgtgccaagcaaactgaaaacgatgctcggccagcttgcttattatttaaagggaatggaaatgttgccttcacttcgaccgacagaagtcgagattgaatatgacggcaagctgtttcaaggcgaaattatgctgtttttagtgacgctgaccaactcggtcggcggattcgagaagctggcccctgattccagcctgaatgacggcatgtttgatttaattattttgaaaaaagccaatctcgcggagtttatcagagtcgcgagcatggcgctcagaggcgatcatattaacgatcagcacattatttacacaaaagcgaaccgtgtgaaagtcaatgtatcagaaaagatgcagctgaacctggacggcgaatacggcggcatgctgccgggcgaattcgtgaatctgtaccggcatattcacgtcatcatgccgaaggagaaagcggaacagctggatgactaatacgcggacaaaatcctaaaacagtattcgttttaggattttgtcatcttttcagcgtgatcggaaacctttgaaggctgacattgaatttgaaggtttgccagcacgctgaaacaaggcttttggtaaaacgagaggtgattatagatgaaaatgaaacccccgatagaaaaaaatgaatactatgacgtgacatttgaggatttgacgcatgaaggagcgggcgtcgcaaaggttcagggcttcccgatcttcgtgccgaacgccctgcctgaggaaaaagcgcaaattaaagtgacacgcgtcaaaaaaggcttcgctttcggccgtttgatcgagctgaaggaagaaagcccgcacagaacggatgccccgtgcccgatctacaagcaatgcggcggctgccagcttcagcacatgacctatgaaggccagctcttgtttaaacagaaacaagtcaaagacgtcttagaacggatcggcaagctggacctctcaaacgtcaccgtgcacccgacgctcggcatggaagacccgtggaactacagaaacaaagcgcaggtgccggtaggagaaagagaaggcggactcgtcgccggattctatcagcaaagaagccatgacatcatcgacatgagcgcctgcctgattcagcaatccaaaaacgatgaagccgtccaagccgtcaaagacatctgtgcagcatacggtgtcaaagcctataacgaagaacgccacaaaggctggcttcgccacatcatggtcagatacggcgtcgtcacgggcgaaatgatgatcgtcttcatcacaagaacaagcgattttccgcacaaagcgaagatcatcaaagacattacggcgcaattcccgcacgtcaaatcgatcgtgcaaaacatcaacccaaataaaacaaacgtcatttttggggacgaaacaaacgtcatctggggcgaagaatacatctacgacctcatcggagacgtcaaattcgccatctccgccagatcgttctatcaggtcaacccggaacagacaaaagtgctctacgacaaagcgcttgagtacgcagagctgcaaggagaagaaaccgtcatcgacgcctactgcggcatcggtaccatttctctatttctggcgaagcaggcgaaaaaagtgtacggcgtcgaaatcgtgccggaagccatcgaggatgcgaaacgcaacgctgagctgaacggcatcacaaacgcggaattcgcagtcggagaagcggaaaccgtcattccgaaatggtatgaagaaggcatcacggccgatacgctcgtcgtcgacccgccaagaaaaggctgcgacgaagccctcctgcggacaatcatcgacatgaaaccgaagcgggtggtgtatgtgtcctgcaatccaggcacgcttgcaagagacctgcgggtgcttgaggatggcgggtatcagacgctcgaagtgcagccggtggatatgttcccgcatacgaatcatgtggagtgtgtggcaaagctagtattgaaataaagcagtgttctcttttggagaacgctgctttttatattaatatgtgaaggatcctttttaattattaagtacaaaggtcatattaaaacagattaatttgaagaaaaatggtattctcaatatagctcaatttagttattttgagcggcgaatttatagagataacgcaaaaagttaatgaaaaggtgaaacaatgatagtctatgaagctacaaaagaagagtttctgagtgatgtgtttgacgacaatttggtgacgaatatctgtaaaaactataatgataagattggcaaaatcaatgagaaagaggttagatcttgggataactctatgcagtatatgtatagggtattaagtgatagagaaattcctaaggacgcaggaattgctattgagttcaaaataccccatacttcaaagcgtattgattttcttatatctggatcagataaggatgatcgttcatctgttgtgattgtggaacttaaacaatgggagaaagtagagaaaattgatagtaaagaggccatcgttaaaacgtttataaataaaggaattcgcgaaacaacccacccatcctatcaagcctggtcatacgcttcgttaataaaggattacaatgaaaatgcgcaaaaagaagatatcaagctatatccttgtgcatacttacataactacttgaatcagggtacagacgatccattaactgattcaatatatgaatattatataaaagaagctcctgtttttatcaaaggtgattcaggtaagcttcgtgatttcattaaaaagtatattaagtatggagacaacaaagaaatcctatatacaatagataaaggaagaataaggccttcaaagtctcttcaagattcgttaaacagtatgcttcaaggtaatcgagaatttatgatgattgataatcaaaaagttgtgtatgagacggctttacatttggcgaatgaggcattacgtacaaacactaaaaaagtattaattgtagaaggcggaccaggtacaggaaaatctgttcttgctataaatttattagtagaagcaacaaaccgaagtcttgtggcacaatatgtaacaaaaaatgcagctcccagaaatatatatgctactaagttaaaacaaaactttcggaaagggcacattgataatttatttaaaggatcgggcagttatgtcaatgctccatcaggtgaatttgacgttttaattgttgatgaggcgcatcgattaaatgagaaatccggtttatttaataaccttggggaaaatcaaattaaggaaataataaatgcttccaaactttctgtttttttcatagacgaacatcaaagagtaacattaaaagatattggtagcactgatacaatccttaaattctcaaaagaattagatgctcaggttacaaatatgaaactggattcacagtttcgttgcaatggttcagatggttatataagctggttagatgatgttcttcaaattcgggaaactgcgaattctaattatattggaatgaactacgattttcgtatatatagaaatccaaatgaattgcgtaaacagatagaagatctgaataaagttaataataaagctcgaatagttgctggttactgttgggattgggtgaaggaaggcaaagctaaaacagaatttcatgatatcgagattcctgaatatcaattcggaatgagttggaatttaaataactcagacacgtgggcaattgatgaagattctattaatgaaataggttgtatacacacatgccaaggtttggaatttgattatgtaggtgtaattataggaaatgatctagtgtgcagggacggagtagtattgactgatcattcaaagcgggcgaaaacagatacctccttacgtggtttgaagaaaatgctaaagcaaaattcagaagaagctgagaagcttgcagacgaaattattcgcaacacatacagaactttgatgacccggggacaaaaaggctgttttatttattgtatagacaaacaattagaaaattacttttttaaaaggctgaaacatatgcaaatgaattacaaagagaatgagttctttaagtcttcatcagttgctgaagaaaaagccacatataagcacaaatgaaaccttttttaattatttattaaaacggaattgggaaaaaatcacgctatgatcttgtacctttaaaaagcagggaggcaagattttgcgacaactgttaaaggctttttaacgaatgcgactaggatttctaccgttgttgcaggaaaagaaaaatctatttgtgtaggagatccttacaaagcttcttaacaaagtggcgattgttaatgacttggggaatgaaagcataatattaacgtaaagcgataaaaggcttcttttaagaagcctttttatgtacgtatatcttcataatcaagataattatttataaaaagataataaatttggataaaaatgagaaaatcctggcgggaatgacgatataaagttagtgaacaacggtatagaatcttatttttcgaggtgaacagaatgggagaagaacaagacattattacagtaaccgatctgcgcaaaaaatatggatcatttgaagcagtgaaaggggtatccttttctgtcaaacgcggcgagctgtttgcatttctgggaacgaacggtgcagggaaatcgaccactatcgatattctctgtacgctgattaaaaagacatccggaaaagtggtaatagatggttatactcttggtgaggggaaagagaataatcatatccgcaaaaagatcggagttgttttccaagagagcattttggatgaacgattgaccgtttatgaaaatatcatgaaccgcggacaatattatcatttaagcaaggcacaagtgcaagagaactatcagtttgtaacagactatttaaaattggatgatattaaggagaaaaaatacagcgatttgtcaggaggacaaagaagaagagcggatattgcccgtgccatcatccataaaccgactatattatttttagatgagcctactacaggtcttgatccgcaaacgagagtatttgtttggaatgcgattaaaaggctgcaggaagaaacaaacatgacgatctttttaacgacccattacatggaggaggccgctgtggctgataacgttgtggtcatcaaagaaggacgcctgatcgcagagggtacaccgagtcagctcaaagatcaatatgcgtttgacagtctgcatatgatgtttaagcaaggcgttgatccgacggcatggtttgaaaataaacaactggattttacggttaaaaactctatttattcccttcgtgtagagtccactctccaagcgtttgacattttgaaaggtcttgaaggaaaaattgaatctttcgaagtgattaaaggaaatatggatgatgtgtttatccatattatcgaagaacaaggaagcagtttgccagtaaaggggagcattgcataaatgaagtctttatccagtttaatcagcagaaatataaaaatatacttccgtgatcgaacgcttttgcttctctctttgctgtcagtatttatcgtcattctgttatatgccgtgttcttacagcagacacagctggacgccattaaggccctggtcggttcgacagatgattccaaagcaatggtgaacgaatggatggtggcgggattgctgtccattacagctgtgacaacgactttaggcgctttcggaattatggtgaaagataaagaaagcaagagaacgtatgactttttaacagctcctttatcaagggcgaccatccaattgagctatgtcattcattcatttgtcatcggcttgatcttttctttcatcgcctttttaggctgtgaaatttttctcgtttcaacaggcagcaagcttttaagcggtacagatatacttgaagtattggggatcattattctttcagttgcactctcgagttccataaatttatttttaacgctgtttattcacacacaaaatgcattttcgacgttaagtacgattgtcggaacagccatcggttttttatgcggagtatatgtaccgatcggcggcgtaccggtgtttgtgcagaagattattatgtatttccctatcagccacaccgccgttctgttcagaaaagcgtttatgacagactcagttgataaagtgtttaaacatgcttctgcggaccaaatacaggaatatgaaaagcattacgggatcgtctacaagttaaacggccattttatcagtacggctgcgagcttgtgggtcattgtcattacagccatcatatttaccgtcatatctattttcatatttaaaaaacaaaataaatgacttcttcagacgatacataacgatgtaacaggcagcatccgtttactggatgctgcctgttttgtttatcattattctttttgtgctcaattcttaattcctcaaaaagttctcggatttctcttgaaaagtgttgaagatatctttatttacactgtatcaggctggtagatcttgcgaataaatcagttgacgtttttttggtgtcttgaagtgaaagagaaccatgggagagtcatctaatacttctgcataaagatatatttttgcccattcataaggtatgatgtagttataaaaaatagcccagcaaggaagtgctgagccattattgacttatagaccgacgtagtttattacaaattctttatcgtcctcatcttcaggcaaaatccccaagttttgatattcccataccacttgccgttgtgttccgtttaagtctgaggcgatgacatcggtgtaatcgtagtcaattgagaagaatttaccgcttcgttcgagatgcaaagtgaggtttgtccataagtcctcgttgtttgttttaaattgatcccgtaactcttcaaagtaatcttgcaattcatatagaagttcgtcatatatatcttcatcaacattaaaatgttcaggaatatcgtgtgaatatatatattcctgattttgtggagtactaaagaagaagtaaacttctgaagaatcatctaaaatttcggcataaagagcaaccttctcccactcagaggggataatttcatttatttgctcagcgattttttgatatagttcgcccattttttcagtttccacaatatcagaatcctttttaattttttttagccgtttgaaagcttattatatgtttagatactcttctatgaattttctatcgtcctcatctttaggcaaaatccctaaattttgatatttccaaacatctcgtctttgaaggtcatcaagttcagacaataaaacatcctcatcgttataatcaattgaaaactttccggtgttttctaattttaaagtgagattagtccaaatatcttggttgcctagtttaaattcttcttttagttcttcaaatagctcttgaagttcaatcagcagttgatcgtaaatctcttcgcttactttaaattgttcaggtatataatgagaatataagtaatcaccattagttggtgttgtaaaataaaagtatatatccgctgagtcatcaagtatttcagcatataaaacgatcttttcccattgagatggaatcatttcatttagatgttcagcaatcttttgatatagttgttccattttttcagctaccattgatgatcctctacctttgttgatagcattatttaatatttagataatccttaacaaattctttgtcctcttcgtcttcagggaaaatccccaagttattgaactcccaaatcatttgtctttcgtattcgtccaaatcagattcaataacatcttcataatcataatcaattgagaacgttccatcgctttcaagattcagtgtcaaatttgtccatgctttagggttattttctttaaattcagtgtgtaactgcataaacaactcttggaggtctagtagtagtccggtataaatttttttactgacctgaaattgttctggtatgtcatgagagtatatatattcatcgttttcgggtgtttgaaagaaaaaataaacttctctggaaccgtctagtatttctgcatacagaacaactttgctccattcagaaggaattatttttcctaagacatcagttatttttagataagctttttctaacatcattatcccaactttattaaattggattttcaggatattcatctaaatattttttattaatttttgtaatgatggatccttaggttcttcccttaagtatttgaatttccagatgataagctgatcactgaaactataatctgtcttaaaccaatctgtataatcaaagttgacagttaattttccggatctttctaggctaagagtgaaagaataaaataattcttgatcatgatctttgaaaacatctctcattttttcgcttagtttaaataattccatctcatactgatcgaattcattttcgtcaatatcaaattcaaacggaatttcaagactgtacttaaaataattaggttcattttgagaattgtaaaaaaagtaagtgcctccgcctgtctctgaatctgagcatagaacaaaaatttctcccatggttctggtatcatttcgttaacgatttcagctatgtttctatataatgcatttaattcattttccaacaaggatcagcctccagcattataattggtaatttgtaaggatcatttgtatcaaaaaaacccccaataaaggagggggaattttaattttgagaatttaaatactgttctaaaaaggattttaaaggtttactcttaggataaattcctacatttttataagtccagattgtttgtctttgagagatggtatatggagattgaataacgtcttcataattatagtctatcgaaaattctccgcttatccccagattaagtgttagattagtccatatatcttgattgttttctttaaattcatctcgtaattcctcgaataagtcatgcaagtcaaataacagctcctcataaatctcctcactgacatgatagtgttcagggatattatgagaatatataaaatcttcactatgtggagtattgaaataaaagaaaacttcagatgaatcgtcaagtatttctgcataaagaataactctttcccattcagatggaatgatctcattaatgctttctgctatcttttgatataattgccccattttttttgtctccatattaacctccggcctgatttttgattctcataagtttagcttcttgatcaccaattttatatttcaccctaaaagcagtaggtcttaatgaatcacctttatacaatgcattaatttcaactgatactttttggggagggtctgcttgcaaagccgatgcccaatcttgctccattttgtaccatttcccgccgctcctattaatctgagaattcatcggcacgatgttgtcgaattggcctgagcctttgaattgggtggcgattaggtggcctccgtcgtcatctgtcagacggtctggtttacctgcttttgattgcgcatattggttgcgttttgcttctcccagctgcaagtctgctttgacacttgtaattctaccatagttgtcagtggtgtacgtgtagccttcttttgttttatagatgacattcggcttcaatactttctttctggtccatttcgcaaaatgctcgccgtatttgaccgttaccggcggtacatgcggtgccggtgtccgtctgccgcttgcggaggttccgtacggtttcggcaggatgaccttggcgaatttctgaagtccttctttaagtgtgaccccgttgactgcgttgtaaggaacgcccgccggcactacgtcgtgacgcggatgatacgggagaatatcagccagggtgagatctccgatttgatgtaacttggttttgacacgtttttttgatacttctatgcctgtgtttactttttgtttgatgtgatcaacggtttgttttgagaccgttatcgctttttgtgctgcggcggatttgcgtgctgctgttttgactttggttgtcactttggcggctgttcctgtttttgagacggcgccgacgccttttgtgccgacaactgatgtcacaacggtgcccactgcatatgacacccatcttgctcttgagtaggtgtcgccattcaccatgtctttttggtacgattcttcgattgccgctgaaatggcttcatacgtcttgatcgggtgagccgccgctcctgtaatggcttcaaccgttccgcccggatctgtgacaatatcccacaggcctgtgaccgcgtcttttccggaatcataaaggccgacggcaacgcctttgaaaccgtctgtaagttcacgcgtgttttcaatttgagtgaagtagcgctgctgttcttttgtcaggtttttatagccgattgttttggccattgagtagaattcatcagcattcgcataatcgtagtttttcagtctttctttcagtttttcaatctctcgttccttcgcttcctctttcttcatcttcaaataagcatccgaatgtcttgcaatctcgccttttttcttatggatgtcgctttcacggtacgccttggcgttgtagtgaagcggcgtggcgctttttcctttgcccgtggcattttgaagctgctggaagtcagcttggatgaactgttcgttcgcttcggtttctgcgtattctttcgttagatcgtgatcaagcttgccgagcttatgtatcgtttcgcttctttttttgtcagctgaagaaagcttctgatctgtgctttccgttgaaaacagatcaagcgagatgatgtcatcgatctcaccgaggatggagcgcatgtcctttttctgctcttccataatcgcctttgatttactgagggcgtgggtgagctcatgctccagaaatgattcctccacatgcgaattggaaagtccggcatcttcgaccttaccgggaaggcttgtgagaaatgcgattttcatgtcgatcagatcaagccagctgtctgtgacgccggcgtggtcctggaaaaaggctttgatgttatctgcgccccgaccagagaaatcgccgtcaccgagatcagccacgccttgaaatgcttttttcagattaaccatctgaccgcgcagttttttgtattcacccgcgcgctgtttggcagcggccagcagggtggttgcttcgaaaactttcatgaccatatcctttcttttgttcgatatcaaaattttaccacgggagtcaggatatacagtgtaggaaataggtaataagaataaaatgaatcttttgacttgcgacttccttcctgtatgaagggaggcttttttatgttttgtacaataatcctcaaattcggcttactgcgctccggtgattttaagcgtgcctgttttttctaatgtcttacactcgaaacaacccaaccgctgaggtataatagaagcagagtatttatcatacagattcaattcgtgaaagagagtggaacaaaatgggccgtaagtggaacaatatcaaagaaaagaaagcatcaaaggacgcaaatacgagccggatttacgcgaagttcggccgtgagatttatgtggcggcaaaacaaggcgagccagatccggaatcgaaccaggcgttaaaagtggtgcttgagcgcgcgaagacgtacagtgtgccgaaaaatattattgagcgtgcgattgaaaaggcgaaaggcggcgcggaggagaactttgacgagctgcgttacgaaggtttcgggccgaacggttcaatgatcatcgttgatgcgttaacgaataatgtaaaccgcacggcgcctgaagtgcgcgccgcattcgggaaaaacggcggaaatatgggtgtgagcgggtctgtcgcttacatgtttgatgcgaccgccgttatcggcgttgaaggcaagacggcggatgaagcgctggaattgctgatggaagctgatgtggacgtgcgcgatattttagaagaggatgacagtgttatcgtgtatgctgagcctgatcaattccatgccgtgcaggaggcattcaaaaatgccggcgttgaagagttcacggttgcggagctgacgatgcttgcgcaaaatgaagtcgagcttccggaagatgcgaaagctcaattcgaaaagctgatcgatgtgctggaagacctcgaagacgtacagcaggtttatcacaatgtagatttaggcgaataaagacaaaaaggccggggcggcataagttccggcctttttattttgcttatgcggccggcctgtatcgtatttctccgtaagcaattattgattatttcgccaaaactgggcggatgcccatacgtttccttccgcatgtcataaactggactgtaacctatgtgaaggagcgataaatcatgaatgaaagaagaccgatttacggcggaggctatggcggctacggaggctacccggggtacggttttggcggctacggtggctacggcggcttcggaggatatccgggatacggtttcggcggaggctacggctacccggggtacggttttggcggttacggcggttacggcggttacggcggttacggcggttttggcggctacggcggcttcggaggatatccggggtacggttttggcggctatggcggaggctacggcggctacccgttccatcaccatcatcatcgggacagccaatatatctgaccattcgggaaaagcactcttggaacagcaagagtgctcttctcatgttcttgcagctgtggtacgattggagcaaaatcatcaagtacatatgacatttctgtaaatcatgagcaagttgtttataaactgaaaagcatgatctgtaaaaatctctttatcgggaggttttacatgtgagaagtgaagacgaaatgatgaaattgattcttgatattgcgatgaaggacgagagaatccgtcttgtcactttagagggatcaagaaccaataaaaatgtaccgcgagacaaatttcaagactatgatatttcttattttgtgaccgatatggactcttttatatctgatgaaagctggctggatcagtttggcgaaagaatgatgatgcaaaaacctgaagatatggaacttttccctccggaactcggagactggttctcctatctcatgctttttaaagatcatcataaaatcgacttaactttgatccctctgagtcaaacagaggattattttacacagagtgatggtttggcggaaatattattagacaaggatgaccgaatcaacagtaagatgattgcgagtgatgaacaatatcatataaagaaaccgacccccggagagtttgatgattgctgcaatgaattttggatggtttcaacctatgtgattaaaggattaatgcgcaaagaaatactgtttgcgctggaccatatgaatgacattttaaggcctaatgttttgcgtatgattgcgtggaatattgggatagagcatcagttttcattaagtgtagggaagaattataagtatattcaacattacatgaatgcgaaagattgggaaattctgctgaatacttatgtcggcaatacttatgaaagcgtgtggaaggcattgtttgactgccaaggtctcttcagagcatattcaaagtcagtggctgttttattgagatacgaatatcctgaatatgatcagcaaattacggaatatacattgaaacattatcagtgctttcaatcagatttttcattatgatttttttacttcaaattccagatgagctgcatggagtccgtttttaacgggcttttttattttcttacagggcataaatgctgatacggattcatacctattaaggtcatgtgtttaggaaaggaggatcgtaatgaaagaaaatcagccgtttacaccggtcaaatcctataaacccttccacagccggtttgatccctgcccgccgatcgggagaaaatactacagaacgccgccgcatctttatatgcggtttcagccttatcacttggagcagttttctccgatggaggcattaagaaaagggaccctttggaaggatctttacgatttctatgataatccttatcgggggggaatcgaatatggcgaaaaagattgatgatgaatactatcggctgctggagcaaattcaggcggcggactttgtcttggtggagctgacgctttatctggatacgcatccccatgaccgtctcgcgcttcagcagtttcatgaatattcccggtactcaaggcagctgagaaaacggtttgagcctgagtacggaccgcttctgcaattcggcgtgagtcaggccggcgctcaatgggactggggccgcggtccttggccatggcaagtataaggagggatctgtaaatgtgggtatatgaaaaaaagctgcagtatccggttaaagtgagtacgtgcaacccgatgctggctaagtttctcattgaacaatacggcggggcggacggcgaattggccgcagcgctccggtacttaaaccagcgctacacgattcctgacaaggtgatcggcctgctgacggatatcggcacggaggagtttgcgcatttagaaatgattgcgacgatgatttataagctgacaaaagatgcgacaccggagcagctgcgtgatgcagggctcagtgatcattacgtcaaccatgacagcgcgctgttttatcacaatgcggccggcgttccgttcacagcgtcttacatacaggcgaagggagatccgattgctgatttatatgaggatattgcggctgaagaaaaggcgagagcgacgtatcaatggattattgatatttccgatgatcctgacctgaatgattcactccgttttctgcgtgagcgtgaaatcgttcactctatgcgtttcagggaagcggttgagattttaaaagaagaacgtgataagaagaaaattttttaaacggccctcaaacatgacggctgtttttttcctttctgcgtttggtctataataaaggtgtcgaatattctgattacaggaggattttatgacaccatttacgattacggaggagaaggcgggggcattccgggtcacctccgcccggaaggatgatgaagaagaagtcatggatctgctcgtgcaggcggcagaatggcttcgcgataaagggtcgaaccagtggagcggccttctgcaaggggaagatacccacaatatgcgggaggcgatcgccaaagggtatgtttttttattcaggcagaatgaagagctggccggcgtcgtcatgctgcttcccgaagcaagcgggtgggacagacgtctatggggcgatgaaggacatgaggagtccgtatatctccaccggctggcgattaacaggcggtttgcaggggcggggctcggccggacgatcatgacttgggcggagacgggggtgtcttgtcctggaaaaacgaaaatccggctcgactgcgtgtccggaaacaaggcgcttcagtcgttttacagcggaatgggttacgaatcaaaaggactcgcgccgggttatcatttgtttgaaaaaaaggtgagcaaataaaaagctcctcatgacggaggtgcaaaagacatggggtttttttatctgatctgtctggccgcattttgtcttaactttgccgtatcggctgtgctccgtaagaaatggccgaaaaagatgtggcctgagtggcttttggcggtgctgggcctgactgctttcggtacggttgtttacagcattttcggtgtcggcggctgggaaggcatgggcttggggcttgccgcgatgtttacgggttccggagcggccgccggttatgccgctgaggtatgcttacgggtcgtcagatcgaatcaaaaacagtaagcagaagtgaaaaaacgcagcctcgtctgcgtttttttgtgtattgccggccgctgtatagaaaacaggcgaatgtccataatggtaatgacttttaagaagaaggtgcgaatatgggacatttacttacagtggcttgggagttagtatgcggcttgggtattttatttgtgattttaaaattgcttggaaaaactcaattctcacaaattacgccgtttgattttatttccgcgctcatcctcggcgaactggtcggaaatgcggtgtatgataaaggcgtcaggattattgaaatcatttttgcttctctgttatggggggttttaatttatctcatcgaactgattacgcagaaagtaaaaagctccagaaagctgttggagggcgagccgagtattatcatacataaaggaaaactgaaatatgatgtgctgaaaaagaataagctggacattaatcaattgcaaagccttctcagacaggcgaattgcttttctatacaggaagcggagtacgcaattttagaaacaaacgggatggtcagcgtcctgccgaaatttcaatatgacacgacgaaaaacggcgacatgcaaataaagccgaagcaagtctctttgccggtcacgctgattattgacggcgaagtgctgtatgaaaatctgaaagaagccgggctggaagaaaagcagctgaatcaggagctgaaaaagctgaacatcaaaaaaacggaggacgtgctgtatgcggaatggaagcccgataaaccgctgtttgtcctgccgtttgaggagaaaaaataaaaagagcattgccctggggcaaatgctctttattatttttcgtgtacgcctgttttaacggctctgacatgatacataccgacatccgtcccaagcatataatcaggtttcggcttgccttggtttgctttgtgggccgcgatgtggtcttcgcttttttcccattgtttccaatggtcttctgactcccagcggattaacacgacgacttcttcatcaccgcggcggacttttttttccaggaccgttacgtctatcaaaccttcctgcttttcaatcacgccttctgaactgaagcgttcgattactttgtcggcatgtccttcttttacggtcatgtttctgatttgcacaaacatctggcagctctccaatcctttttacgttttatccaacattttaaatgaaaatgattctcaaagtcaattaagatgcctgacggattacgatttcaggagaaagacatgaccatcctcatctttaaattgcacgaagctgccccattccatttgtttcggttcatctaaaaaggtgatgccgttccttttcatctgttcatatgcggcaaagacatcttcacactcaaatacgatagaagccttcatatgctcggcgcctttcatcatcgatttcggataaataaccaaatgagtggcggcccctttgggcgctacctcaagccagaaggcgcccggtcccatcggatgctcggcgacggtttcaaaccccgctttttccgtccagaatgttttcgctttttgctgatcatcagtgtatacggcgactgtcgcgatttttttgatcatcatactgacctcctgtttcatttcttttatagtgtatcctcctgccgaaaaaagcaatcaaaagcttaatgtgcaggtttttttaatttctctagtgcgatcggtgattccgatttataatttagacaaaagtacatattcttgaaagaggagacggcagtgaacaaagaccaattacttcatgattatattattacacattcggcagagctgacggaaaaatggctcaagctgagacggaagctgagagggcgtttttattctgcggatcaattaagtgaggaaatgaaacggctgctgatcgagcagcatacctttacaaacacggtcatcgcaagcgcttttttggaagatccggccgtttttcagcataacaaagaaaaatgggccgctcaggtagcgaaaagcagagtggagcaagacgcggaggttcatgaggtcgttgaggcgatcggcaattcaagaaccgtcttttgggaggcggtcacccgttttatggatgagcatcaggacattgtaacaaatgaggatgcccgccgctggaattaccttgtcaacggctcgtttgatcagctgatgacggattttactgaacagtttcagaaattaatgatcgcgaggctgtcatctcagcaggagcttatttccgaattgagctgtccggttattttgatcgcggatacgatcggcactctgccgctcatcggcgcgattgatacgagacgggcgcgtgtgattttggagtcggtgccggaaaactgtgtcgccaaacggatcacaaaccttgtaattgatctgtccggtgtgcccattgtcgatacgatggtggcgcagcaattgtatatgctgtcgaaaacgttatttctcctcggcatcagaaccgtgttttccggcattcggcctgatgtggcacagacttctatccaattgggacttgatttttcagagtatcaaacttacggctctctggagcaggcgctcgccagcatgggtgtcacatgtgtgatcgaggaagcaaaagcatagaaaaaaggtgctccgtccagaggcggggcgctttttttgtcagcggaaaacaatttaaatatgtcggaacgtgaagattgcgttcttaaaaacagcaatatgacgccttgggggcgggcgtcggcgacacggtttatgtcaaagcaaaggaagtgaaagttttcgcaaagaaaacatatccgaaaattgtgtaaatgctgttgatttctgaatgaaaacataatagtataattatatatttcttatcagaatagtatggattaaaacactcattgtcaaaagacgaacgtccagacataaagggggagcatgatgacgtccaaaggaaacgtagatccgcatgtgatcgaaaagattatcagtgcgctggaaacgctcgatttcgggactgttcagattacggttcataattcccaagtgacacaaattgataaggtggagaaatatcgattttccctgaaaagcaaagaagtaaaacaatcttaaaaaacagccaatgacaggaggcggtacatatgaagcattcaactgttcctttccgggagagccggtatctgcacctgcccgaagtgcgctttctgcattggtgcacgaagcaatacggcataaataaaggcgtgctcaatacaattgacggctggttttatgatgcgggcgtcattccgattcccgtcaggcgtctttatgtgctggcattccttgatttcgtgaaaacgccggggcagaagggaaatatccgattcgggcacggcggattgacgaaaaaactgcatgatttcatggatatgcaggagtgcgcagcgaaacgtcaggcctgacatccttaaaatcttcttaaaatcatgcaaatttctcccattttatttataatagacctatcacgatcattttttgggaggacttttgacatgcaaactgctgcttatgagagcaaacaatctattatgcagcgcattatcacggtatttgtgtttacactgttagttgcgacaatcggcctgtatacgggccagttcattccgccggcattgatgctgccgctgtcggtcttggaggtcgtcatgatcatcgccgcattttggctgcgccgaaaaaaagccgtcggatatgtgtttgtcttttcattcgcttttatttccggaatgacgctgtttccgatcatcagccattatgcgtccgcagccggagcctatgtcgtattggaggcattcggttcttcgtttgtcatttttgcggtgctcggtacgatcggcgctaaaacgaaaaaggacttgtcgtttttatggtccttcttgcttgtcgctcttatcgcgcttctcgcagtggggatatttaatattttcagcccgctgaattccgccgccatgatggcgtattccgtcatcggaacaattgtgttttcaatgtacatcttatacgatctgaaccagatcaagcaccgggacatcacggctgacctgattcctttgatggcattgacgctttatatcgactttatcaacttgtttatcaacctgcttcggtttttcgggattttaaacagtgatgattaatcgcgcgaaaaaggcgccctgctaagaggggcgccttttgttaattttaagagttttgaatttttaatctcataagccatgagattccctttgtcatacgtttgccagctagaagtgaacggagggtttgtcataataacaaacctgtttcaaaaaatttgaaaggggaaggatattatgccttgtagtacagattatgcaacatatgtattgagagtttgtaccgatgcggattcttattctgcaaaagctacttctattgattgtgtagcatcatatgggggcgggacaatcgcaacatttgattattccatgacaattgatgtttggaacggttcaaaatgggtggctaatgaaacaaagaaaggttctttcagtcactcaacacctaaaaaagtatttaaactctcaaatcaaaaatcgttaaaaaaaggatcaaatagtgtgagagtgaggttgaagactaaaaatcgatatacaaatgtaacttccagcattaaaacacctgcatttatagtgaagagaaagtaattttaaaattatttcttctgaaacagcctgaacaaactaatgtgcaggctgtttttttataaccctcatctttttacttcaatttctatctcatagaaatttgcctttgtttttacaatactactttatgttctgtctccggaaaacagcagaagcttatcaaataaaacttcaagcatttttgtcaattccgctttttctccagcggtgaagctttccatgactcctgaaatgttggagaagtggccgggaagaaacagcatcagcttttcttttccttcccttgtaagttcgatgctgatttttcgtctgtcaccggtatgccggctgcggtttacaaagccgtcccgtgcgagtccgtcgatcaatccggtgatggtcgctttggtgacattggattttttcgccagctccgtcggactcaggctgtggccgggttcgtcaaacagaaacattaaaattttgaatttcccttcggacaatccgtgacttgagaaataatgctccatgacctgattcatttttttagacatatcaaataacgtcaaaaatgttttcaatgattcagcatccatatcggcgtaaatctcagcgcgtccggcaatctgcgagtaatccggcaaatgtctcaattccattttgtaagcctccgtaccattttagtgattcaaagtataagcttgccggattcaaaaggcaacctataaagattgacagtttttcagccaatatagtaaggtggctaatagttaacaaatgataaataaattgagaaggcggtatcgtgatgaaccatgaagtgaaaaagatcatcatagcgggcggagggatcggcggcctgtccgcagcgatttctctcggcagagcgggttttgaagtaaccctttgcgaggcggcgtccgacatgcgaaaaagcggagcgggcattcttcagcctcaaaatgcgcttcgggtgcttcgggaaatcggtgtgtatgatgaatgctgtcaacacggctttcaaacggattggctgaagcagcatgatgaaaacggaacgctgcagtttaaagtgagtgaggcgtttttagatgattcattgccggggcggaataatatattgcggcaaacattaaacgatatcctcagcaagcatgctgaggcggcgggggtcacgattctgcccggtaaaaaagtcgtgtcttacgaagaaacggcagatgaaataacggtgcattgtggagacggaaccgcgatgacggctgacatcctcgccggctttgacggcatccgctccgctgtccgcaatcacatgctgcaaagggaagtgaaaacagagtatctcggcatgggagcgcacagattttacatttcttttcccgagccggtttttcatgattcgacactgatgtataaaaaggggcagacgcaggtcggggtcgtgccgctctctgaaaaaacaggatacgtatttatcatccggccgtatgacgctgacttcagggatgacgaggacacgcgttttgaacgggtgagagacttgctgcgcggaattccgggagtgaagtttgtgacagagaatatgtcaaaggaatatcccgttttgtttcataagattgagcagatggcggtcaaagaaccgtggcacagaggccgcgtcgttctgggcggggatgccgtccatgcaggagcgccgacattggcgcagggagcggcgatggcgattgaagacgcgattgtgcttagtgaagaactgcaaaaacacgaaaaccatgaaactgcatgtcaagcatacttcgaaagacgggcggagcgggcattacaggtgcagaatctctcatctgaaatcgtccgccgcgagataaagggaacgcccggcgtccaagacatcatcggtgaatgctatcgattgctcaaagagccttattaaatacagaaagtccagaacatggcgtctggacttttgtcagtcttgttcagatttattccgtatccgctcaatcacctcatgcagcccctcaggcttgtgaaactccaccggcgaactgcctttttcaaacgagatcgtctccgcctcaatgagcgcgacatagcgcccgttcacttttgcgagatggatggattcgccgaaatcagccagtaatcctttaatctctgtttctccgactttcattttcagctcggcttccggcgtgtgttcaatgatctgcgcggatgcctcgatgacttgatgggtgtcgaggcgctcctgaatttcccgcttttcactcgcttcccaaatttcaatgtcgtgctcaaactgctgaagctcttcgctgttttcttcaaaagtttcatacacgtgctcctgcaccatgttcatgacttggtttttcatgatttccggcatcgattcgccatattcgacaaatttgagaaaatcttcgaaataacgggcgtgcgaggcctggtggattttcagctcatgctcttccgtcatgccttcttccggcatatacggatattgaatgcttttcatgttttttgtcgtgatggccatttcgacctttttaatgagagacgaggcgtctgagatgcgggcgaccttcggctcgaaatcgcatttcatcataaagacgaatttgtcctcaaaatatttgcgcggaacggccgaagccacgataaaaacaccgccgcgcacggcgctcgtgtcaagataagtacggacgaactgttcgcttgcctcgataaatgcttccttcgtatccgcaagtctggcgcggttgaaaaggttgtaattcggatttgaatcaagctcatggcccggctccgtgataaaatggccgatttttgtggggacctgctcggattgcggatgccgttcagctttccgtttgacgattttcttcaattccccgtcaagaaaatccttcagctcgctttcttcaaattcgtctgtgtcaagggtctggaaatgtttgaactgtttgtttgcctgttcgtcttttccttccacttgaatgacataaaacgataaaaacttgatttcaaaatccatatgtgaactcaccttatttctgtatttaacaagcctctccagtatagaaaaaaccgttatcaatcgtcaatccggggattgatccgtaacggcggataattggccggtgaaaagggcactgtagttggaaggaacgcatcaatgtgtaagaaagggtgttattcatgaaggaaacaggtccgattccgcagccgaagacattcggtcctctcggcaatcttcctttgcttgataaagacaagcctacaatgtcgctgatcaaactggcaaacgagcaggggcctatttttcagctgcataccccggcgggcgccattatcgtcgtgtccggacatgaactggtgaaagaggtatgtgatgaagagcggttcgataaaagcattgaaggtgctttggagaaagtccgggcgtttgccggtgacgggctgtttacaagctggacgcatgagcctaactggcgaaaggcgcataatattctgatgccgaccttcagccagcgcgcgatgaaagattatcattcgatgatgactgatatcgcggtgcagctgattcaaaaatgggctaggctgaacccggatgaggccgttgatgtgcctgctgatatgacccgcctgacgctcgatacgatcgggctttgcggctttaactatcggtttaacagctattacagggaaacgcctcatccgtttatcaacagcatggtgcgcgcccttgatgaagcgatgcaccaaatgcagcgccttgatgttcaggataagctcatgatcaggacgaagcgccaatttcatcatgacattcaggcgatgttttcgttagtagacagtattatcgcagagcgccggtcaggcggacgggatgaaaaggatctgctggccagaatgctgaatgtggaagacccggaaacgggcgaaaaacttgatgatgaaaatatccggtttcaaatcatcacgtttttaattgccggccacgaaacgaccagcggcctgctttcctttgccatctattttctgctgaaacatccccgtgttttggaaaaagcctatgaagaagccgatcgggttttgaccgatcccgttccttcttataaacaagtactggagcttagttatatccgaatgattttgcaggagtcattgcgcttatggccgaccgcgcctgcgttcagcctttatgcgaaagaggatacggtgatcggcgggaaatatccgatcacgccgaaagacagaatttccgtcttaattccccagcttcaccgtgataaagacgcgtggggagacaatgcggaggaattttatccggagcggtttgaacatcctgatctagtgcctcaccatgcgtataagcctttcggaaacgggcagagggcgtgtatcggtatgcagttcgccctgcatgaagcaactcttgttctggggatgattctgcagcattttacctttatcgatcacaccgattatgagctcgatattaaacagacactgacgattaagcccggcgactttcatatccgggtgcggccgagaaacaaaggagccgttgcggcagctctcccggcggctgaaaaagcggcggaagacgtcgaaaaagaaaaacgggaaacaaaaggcgcatccattatcgggcttgataaccgaccgcttctgattttgtacggctcagatacgggaaccgcagaaggcgtggcgcgggaacttgccgatactgccgggatgcacggcgtccggactgaaacggcgcctttaaatgaccggatcggaaaactgccgaaagaaggagctctcttgatcattacgtcctcttataacggaaagcctccgagcaacgcgggacaattcgttcaatggcttgaagaagtcaaacccggggagctggaaggtgtccgatatgccgtcttcggctgcggtgatcataactgggcggcgacatatcaggctgtgccgagactgattgatgagaagcttgccgaaaaaggggcggaacgcttttctgcccgaggcgaaggggacgtcagcggggattttgaaggaaagcttgatgaatggaaaaaaagcatgtggacggacgccatgaaggcattcggtcttaagctgaatgaaaatgccgaaaaagagcgaagtgcgctgggccttcaatttgtcagcgggcttggcgggtctccgttggcacagacgtatgaagcggtttacgcatccgttgcggaaaacagggaacttcaggcgccggaaagcggccggagcacaaggcatatcgaaatcactctgccgaaagaggctgcctatcatgaaggggatcatctcggcgtgctgccggtaaacagcaaaaagcaggtcagccgtgttctccgccggttcaatctgaacgggaatgatcaagtgctgctgacggccagcggacagagcgcggctcatctcccgctcgatcggccggtcaggctgcatgatcttctgagcagctgtgtcgaattgcaggaagcggcatcaagggctcaaatccgggaaatggccgcttatacggtctgtccgccgcacaaacgggaattggaagattttcttgaggagggcgtctatcaggagcaaatcttaacatcgcgcgtctcgatgctcgatctccttgaaaaatatgaagcgtgtgaacttccgtttgagcgatttctggagcttttgcgcccgctgaagccgcggtattattcgatttcaagttcgcctcggaaacatcccgggcaggcctcaattaccgtcggcgtcgttcgcggccccgcccggagcggtttgggtgagtatcgcggagtcgcttcgaattatttagcggaccgccgccctgaggatggtatcgtgatgtttgtccgcactccggaaacacgattccggctgccggaagatccggaaaaaccgattattatggtcggtcccggcacaggagtcgccccgttccgcggatttctgcaggctcgggcagcgttaaaaaaagaaggaaaagagctgggggaggctcatctgtatttcggatgcagaaacgatcatgattttatttaccgtgacgagcttgaagcttatgaaaaagacggaatcgtgacgcttcatacggctttctcccgcaaagaaggcgtaccgaaaacgtatgtgcagcacttaatggcgaaagacgccggcgctttaatttccatcctcggccggggagggcgcctctacgtatgcggagacggcagcaaaatggcgcccgatgtagaggcaacgctgcaaaaagcgtatcagtcggtccgcgaaacagacgaacggcaagcgcaagaatggcttttggacctccagacaaaaggcatttacgcaaaagatgtttgggcggggatttgagcgatgtgatgaaaaggactggatgactccggtcctttttttacatcacccaaaaaaaaccttcaagtttttcagtccctttgcatacaataacttcagcccgcctgttgggcggctgtctttgatattcatttttcgtttttagaagtttgtgttattcttatatttggtatctcctattttcagaccgggtctgataaggtaccttttaatgccagaaaaaaatgtgaaacgaagaacggatatcctgcgtctaatggctggcgggataagatgttcaataggcatgacacgaatgataaatatatcgttttttaaaatggtgtgtttatggggctgtgtgatgctttcgttttgctcggaaagcaggaattgaagcaaaaagtaagaatacagatttaaagtgtttaggaaagtagaggttgccatgaagaaattattttcttacagacttagtttttttgtactggctattattttgttttgggccaaaacgtatttagcctatcatgctgaattcaaccttggggtgaagggtccgacgcagcagtttctgcttgtgatcaatccgttctcaagcgccattttctttttaggactggcattgtttgcgaaaggccgcaaatcagcgattatcatggtgattattgatttcatcatgacgtttattttgtatgccaatatcctattctatcgattcttcgatgatttcttgacattcccgaacttaaagcaatccggtaatgtcggaaatatgggagacggcatcttcagcattatgtccggccatgatattttatactttgttgatattattattttaatcgcgcttctggtgtggagacgtgagctgaaggaattcaagctgaaaaaacggtatacgtcattaattatcgtgacgggtattgtgttgttcttcgtgaacctggcgattgccgaagaggaccgcccggagctgctgacaagaacgtttgaccgcaattacattgtaaaatacttaggcctttataattacacgatttatgacggcgtacagacggcgcagacggaatcacagcgggcatatgccagcagtgatgacctgacgagcgttgaaaactatacatcgtcgcattatgcgaagccgaacgccgagtatttcggcaaggccaaaggcaagaacatcattaagattcacctggagagcttccaatcatttttgatcaattacaaacttgacgggaaagaagttacgccgttcctgaataaactcgcccgcggcggagaggacatgacgtactttgataactttttccaccaaacgggccaaggtaaaacatctgacgccgagctgatgatggataacagtctgttcggactgcctgaagggtcagccttcgtgacaaaaggggaaaacacgtatcaatcgcttcctgccatccttgaccaaagtgagggctatacaagcgccgttttacacggtgactacaaatcattctggaaccgtgaccagatttacaaacatatcggctacgataaattctttgacgccagcacatacgatatgtctgatgacaaccttgtcaatatgggactgaaggataaaccgttcttcaaagaatctataccgaagcttcagtcgctgaaacagccgttctacgcgcatttgctcacgctgacgaaccattatccgtttacgcttgatgaaaaagacgcaacgatcgaaaaagcgaaaacgggcgacgcgactgtggatgactatttccagacggcgcgttatcttgacgaagcgcttgaacagttctttaaagatctgaagtcatccggtttatatgacaactcggtgattatgctttacggagaccattacggaatctctgaaaaccataaccgcgcgatgaaagaaattctcggcaaagaaattacgccttatcaaaacgcgcagaatcagcgtgtgccgcttatgcttcgcatccccggcaaaaaaggcggggtgaaccatacgtacggcggtgaaatggacgttgtgccgacgatccttcacttggaaggcatcgattctaagaaatatattaatttcggcaccgatctcttctcgaaagaccatgatgatacggtgacgttccgcaacggagattacgtcacgccgaaatatacttccatctccaatgtcgtatacgatacgaagacagggaaagaactgaaaggcaatcaggaaacgaaaaacctgaaagccagagtcacagagcagctgaagctgtctgacagcgtgatgtacaaagacctgctcagattccacaaattgagcgactttacgccggttgatccgtctaaatatcattacggcaaagaaaagctgaatcaggataataaataatagaaagagccttacggaatttccgtgaggctctttttttgtgtgtatcttcaccaatctgaaaaaagagagagcttttggtcacaaagggcgccaatctctcatatcttacagtagattttgaaaccggtggtagagaatcggacaaattatcgggttggtttctcttatacgggcggtttcgaatccaatattcacagagaagaggggtagagatgaaagcagtcattctctgcggcggaaaaggaacgagaatgagcgaaatcaccaatgaacgtcccaaaccgctcgccatgataggcggcaaaccgattctatggcatattatgaaactctatcaatactatggcgtgaacgaatttatcctgcttcttggtttcaaaggagagatgattaaggaatatttcttagattatgactggaagaatcacagcatgacgctggacagctctaccggagaagtgcggatattgggaacatccgagccgtggaaaatcacttttttagacacgggggaacacacgcagacagcggggcggcttttacaggcgaaggacatcatcggtgatgaaacctttcttatgacgtacggggacggactggcgaacatcaacctgtttcatctgatcagctatcatcaatcaaaaggggctgcggcaaccgtcaccggtatagaaaagacctcgcaattcggaacgctgacggttgaagacggtatggcgaaaagcttttctgaaaaaaactcaagtgacggcatcatcaacggcggatttttcgtgctcagcccgaaggtatttgattatctgccgaaagacagggacgtcatgtttgaagaagaaccgctgaaggagctggcaaaggacggcgaattggcggtataccggcattacggtttctggacggcgatcgatacgtataaaaatctgctggaaattaacaagatgtgggaccggggacaacatgtatggaaggtatggtgatcaagtttgagtttctggaaaaataaaaatgtgtttgtgacgggatgtacaggtcttttaggaagctgcttggtgaaggaactgatcgatcagggggctaatgtgacgggacttgtccgtgacactgtgcccaagtcgaacctgtatcagggagaacaagtgaagcaaatgaatatcgtgcagggcgcgcttgaagatctggatgtgattgagcgggcgctgggcgagtatgaaattgacacggtctttcatttagccgctcaggcaatcgtcggcgtcgcaaaccgcaatccgatttccacatttgaagccaatattctcggcacatggaacatccttgaagcgtgccgcaggcatccgctcatcaagcgggtgatcgtcgcgtccagtgataaagcgtacggcgaccagccgacactgccgtacgatgaaaacatgcctcttcagggcaaacatccgtatgacgtatcaaaaagctgtgccgatttattaagccacacatattttaatacgtacggacttccggtctgtattacgcgctgcggcaacttgtacggcggcggagatttgaacttcaaccggattattccgcagacgattcagctcgtgctgaacggtgaagcgccggaaatccgcagcgacggcacatttatccgtgattatttttacatcgaggatgcggtcgaggcataccttttgctggcggaaaagatggaggagctcaatcttgcgggagaagcgttcaacttcagcaatgagattcagctgacggtgctggaacttgtagaaaaattcttaaggcgatggacagtgacctcaagccgaaagtgcttaaccagggaagccacgaaatcaagcaccaatatttatcagcggaaaaggcgaggaagcttctgaattggacgcccgcgcataccattgatgaaggattagaaaaaacgatcgaatggtataaagccttttttcaaaagtaacagaaacagaggtgagagaaagacgtgacaagcgcatattgcacagttttatcaaaaggaaggctgtatcaggctatcgctttgttcggctcattgaaagcggttcaggcggacgcccccatttttactttgtgtatggatcaagacacctatgacgtgcttcaggcaatgcgtccggataatgtcaccttgattcaggtgtccgcactggaaaatgaggagctccttgaactgaagcggacgagggatcagagcgaatactgctggacggtgaagccggtatttctcgaattcgtgctggacggacatccggaattagagcgtgtcacgtacattgatgccgatttgtttttcttcgctgatccgcgcgcgatttttgacaatcagccggattgttcggtgcttctgtcacggggcgatatcgtcattccctcatttgaaaaacaggaaatcgacatgctgcagcgtcttttaggccggtataattccggttttctcagcttcaaaaccgacagtgccggcacagattgtctcagatggtggaaagaacgctgccttgaagaatgcaaaaatgcgccgggcgaaggaaaattcggagatcaaggctacttggattacatgtccggtctgttcccgaacgtgtgtgacatcaccacgcccggcgtgaatatcggccattggaattacggccgccacacgttttcatggaaggacgggcgtcttgtgctcgaagacggaaatccgctgattttctatcatttcagcggataccggatcgtcacagccggcgacattcggcagattcatgagacggaccggaccgacctgccgtttgtccatcagctttatcaggacattctgaagcgggtgatcgggacggtcagcgccgtctgccccgagttcagcggctttgcatctgaggatgataacaaataaatgatcatatacaggaagtgaacgaaaagtgaaggcaagcgtcattgttcccgcatataattccaaggagaggctttataacagcctgctgtccctgaatgaacaggaatgcacagagccgttcgaagtgattgtggctgacaacggttcggaagacggaaccttatccatgcttgaatcattcagcgcgaattttccgctgatttttgtgagaattaaagaaaacagagggatcgcttacggccggaatcaggcggtccgcaatgccagaggcgatattttgattttccatgacagcgacatgcttgccgaaaaggatttggtggcgaagcatatcaaggctcatgagaaccgggacgatcttgtcgtatgcggtatgttctggaagcggatttacagcttttattatgaccgttttgaaaaagagcataaggaaaaactcgccgaactgtatgaagagctgccgggcgataaagagccgctccttgatgaaagtgacatcagagacggaagctttcttgaacgatgctttgatttagataccgactttatccgggtgctgaaaagcattttggaaaaatacggagatgatttgaacggctaccgtctgccatggcgttttttcattacgaacaattcatcagttaagaggcagcacgtggcagatctcggcctgtttgatgaaggcattgtcagatacggctttgaagattatgatctcggcatcaggcttcatcagtcgggaatgagatttcagctgcggcgcgatatcatgagcgtccatcaggagcatccgagcaactgcgcttccgttgatgacatcagggcgaatatcgcgtacatgtgcgacaagtacaatgacattcattcgcttgacgtgcacctcgcgtttaacggcccgtttgacgcggagttaaccaacagcataatggcagacatcgaagtgctgcttgattatgagaaatatgaaagcctgctgcacatttttctcgaactgctgcacgcggttaaagaccgcaacctcgatccggactggaagacgaaaagcccgcggatcacggcgaacagcttccagctgccggaggtcggaaagcttttggcaaaagcggaaaaaaagctgggcgtcacgcactttgcaagggcgttcaaagcgctgactgctgatttactgcatgtggatcttaaataaattggatgtgatatggtgagtaaatatcatttttcaaccattgtttccagaacgcatatctttaaactgatgccgatgattcattctctccatgagcattgccgggattttcatctgtatgtgctgtgtgtcgatcagaaagcgtacgaactgcttcagcaggtgccgtgggaacatgtcacagcggttcagctccatgaaatggaggacccggagctgcttgaagcaaagggcggccggacgtttcatgaatattgctggacgctgaagccggcttttctgttccatgtgatgacggagtatgatgaagccgaatattttgcccatttggacaccgatctctttttcttctcagatgcgggcgagctgtttgcggaaaagccggatgcttccctttttctgacggatcaccgcaattcagaacggtttgcgtcttattacaagctgacggggcagtacaacaccgggtttgtcggcgcgcggaataccggggaagcgtatcgggcggtctggcagtggagacaggattgcatctcctattgtacggtggagatgaatgaagaaaaaaagacatacggtgaccaaaggtatgttgaaaagtggcccgcgcagtttgaacacgtgcatgtcacggagtcgatcggcgcgaatgcggcgctgtggaatattgagcaatatgacgtcagcctgcgcgacggggctgtatatgtcaatgacaccccgctgattttttatcatttttcaggctttacgctcgtcacggagaacgaattcaatctctgctggtactatcacattgatgatgaggcgacagtcagtatgatttacgtcccgtacatcaaaaacgtaaaaaaatggattgatgaaattcaaaaagcgtttcctgatttcagagacgggtttattccgaaatatgcggttcctgacactcatttttatacggttgaaacataaaatccctgccttttcggcagggatttttttatgaatgccattcttttaatgttttgtcgctcggcaggacaaaggcgagcagacctaaaacgggcagaaaggcgacggctgtcatggtcggcgtcaatcccgctgaatcaataagagctccgagcgcaaccgctccgatcgcgcccattccgaaggcgagcccgaccgtaagccctgacatcgttccgattttgccgggaacaagctcctgcgcgtagacaaccgtcacggagaagctggacatcagaacaacgccgatcagcgccagtacgccataggcgatgacaggtcccgcaaacggaaggaaaatcgtcaagggagccgatgccgtcatggaaacgatgatgacgttccgctttccgaaacggtctgcaagcggcccgccgagaaacgttccgacagctccgaaaaataaaaagacgaagatgtagctctgtgcctgctgaatgctgacatgataggcattcatcgcatagaacgtatagaagttgccgatcgcgctcacataccaggagcgcgcgaaaattaagaagataatcatgataagtgcaagaataatcggttttgtaatcacggtctgcacagcggcggccggtgattttttacttgcggcgcgcaaatgaataaggcggcctttataccatttggcgatataaatgagaaacagcacagcgattgcggcgactagcgtaaaccagacagagccgaattgaccgagcggaacgagaatcagcgcggtaatcaagggcgccatcgcctggccggtattccctccgacttggtaaatcgattgcgccaatccgcgcttttcgccggcggccatgtaagcgacacgcgatccttcaggatgaaagacggcggagccaaggccgataaaaaagacacagcataaaatcgtcagaaaagacggggcgaacgcgagacctaaaatgccgagcatgcttgcggtgagtccgagcggcaaagcatacggcatcgggcgtttatccgtataccagccgatgacgggctgcatcacggaagacaccatattcagcgtaaaggcgataattccgagctgcgtaaatgtaagattcatggaacgttccaaaatcggaaacatcgccggaatcaccgcttgcagtgaatcgttcagcagatgacagatcccgataatgaacaaaatagaatacatggttgtctcgggacgatggacaggtttttctttaagcggggcggcaattgccaaagtgattctcctcctttttatgtaaacgaagcatacaccatattattcataaggtgaatgaattatcaagggcaaaaaaggctcttctttctcaaacagaaaaaagagcctccctttttatttatttaacaaactgtgttttctcgaatacatcatatataccacgatcccggcggcgatccagatgacaaaggcgagccatgtcacgcccggcaggctgcttgcgagatacaggcataagcatgcgctgatgatcggcacaaaaggcacgaaaggaacacggaaggaagatttgatctccggatgtttctttcttaaaacgatgacggcgatcgcaatgactgtaaaggccgccaaggttcccatattgacgagatgcgccaaggttcccagatcaataaaacctgcgatcccggcggcagcgatccccgtcacccatgtgttttgaaacggtgttttaaaacgcgggtgaaccttggaaaacatgcggggcaaaaggccgtctctgctcatcgcaaatgttaggcgcacctgagcgtaaagcagagcgagcatgaccgttgtaatcccgataatcgcgccgacggaaataatgcctgctattttgttctggccgacaaattggagcgcgaaagataccggatctccgacattcagcttggtgtacgaaagcattcctgtcaggacgagcgataccgtaatgtaaagaacggtgcagatggcaagcgcgccgatgattccgacaggcattgatttctgcgggtttttcacttcttccgacgcgtttgacacggcatcaaatccgagatacgcgaagaaaacggtcgcggcgctcgtgatgacgcctttcattccgaacggcataaacggcgaccagttttccggtttcacgtagccgaaaccgacgacgataaacagcagaatgatcgcaattttcatcaatacaatgacattgttaaagcgggtgctttctttcacgccccttgaaacaatcgcggtaatgaccaaaataatgataacggccggcaggttgaacacggcacccgttttgctgccgggtgcggcggtcagcgcctccggaagatgcagcccgaatcctgcaagaagcgactggaaataggatgaccagccggttgcgacggcggcgagcgcgataacatattcaagcattaagtcccatccgattaaaaacgcgagacactccccgagagtaacatatgaatacgtatatacgctgcctgaaatcggaatggatgaagaaaattccgcataacaaaacgcggcgagcgcgcaggcaaggcccgcgagcacaaacgacagaatcaaagccggtcctgcgcctgtcgcggccacagtcccggtaatcacaaaaatccccgtgccgacaacacagccgattccgagcaaaaccaagtcaaaagcgcttaacgagcgggacaggctggtctgtttgctctgggcctttaagtcggccagcggctttttccgaaatagtaaagacatatgggtcctcctgaaaattcataatattcttatcattatatacactgacgtttgtattatattgtcgaaatttctcgcagtcaattaaagaattttccactttaaaaggacaaagctaaaaagcgtcgatgcacggaaggaaagggaattttattgtgaaatagttcaattttctcaccttaagaccgatacaaaagatgactcatcaactaatttcaagtttcggtgaaagggagatgtttacatgtttcaatatgaagaactaaataagcagtttatcggcggccgatggagggatgggagcagccggaacgtattggaaaacagaaatccttatactcaaaaagtcatcacctcattccgaaaagcgacgcctgatgacgtggatgcggcatatcgcgccgcggctcttgcgaaacaagaatgggacaaagtaaacccttttaaaaagcgggccattttggaaaaagccgtttctttcattgaagagcacgaagaagcgattatttacttaatcatggaggagcttggcggaacacggctgaaggctgagtttgaaatcggacttgtcaaaaatatgataaaagaagccgcaacatttccggtgcggatggaagggaaaattctcccgtccacgattgacggaaaagaaaacaggctgtacagaatacctgccggagtcgcaggggtgatcagcccgtttaatttcccgtttttcctttcgatgaaatctgttgcgccggcactcggcgcggggaacggcgtcgtgctgaagcctcatgaagaaacgccgatctgcggcggaacgcttatcgcgaaaatttttgaagcggccggcgtaccggacgggctgctgaatgtcatcgtgacggatatcggggagatcggcgacagctttgttgagcatcccgtgccgcggataatctcatttacaggctcaaccggagtgggcagctatatcggacagcttgcggtcaaacactttaaaaaaccgctgttggagcttggcggaaacagcgcgctgatcgtgcttgaggatgctgatcttgaatacgccgtcaatgcggccgtattcagccggtttacgcatcaaggccagatctgtatgtcggcgaaccgcgtgctcgttcacacatctgtttatgacaaatttacagagctctacgaagcgaaagtgtcatcgctgaaagtcggcgatccgatggaccctgatacggttatcggtcctttaatcaatgagagacaggcggaaggcctgagacggtctgtcgaaaaagcgatagaagagggagcggttccggtgctgtccggccgattcagcggaacggtcgctgagcctgtcattttaaaagatgtgaaacctgagatgagcatcgcgaaggaggagctgttcggaccggccgtctgcatcatgccgtttgaaacggaggatgaagcggtaagcatcgcaaacgcgacaccgttcggtttaagcggagccgtgcatacggcaaacgtggagcggggcgttgagtttgctaagcggatcgaaaccggcatgattcacgtcaacgatacgaccattaatgatgaaccgaacgttgcgttcggcggcgagaaacaatcaggtctcggcaggctgaacggcgaatggagccttgaagaattcaccacgctgaaatggatttcggttcagcatgaaaaacgccaattcccatattaagaaggagtgaaagaaatgagtatacagacggagcagcaaacgcacagcctgcttgacgcttttgtcaaagttgcgccttttttaaacagcctgatccaagatgacatcaccatcggaatttatgatacagaaaaattaatcgtgaatattccggctaaaacgttttctcttaatgtaaagccgggagatccgctgcaaaaaggggacatcattacagacgcgatccgcatgaatcagaagaagacaagcatggtgccgaaagagctgttcggatttccgctgatcgccagagcgattccgcttcacgatgaaaacggaaaagtcatcggcggcgtcggtctcggcacgagccttgaaaaatcagccaagcttcatgatgtcgctgaaagcctgtccgccgtcgtggaacagaccgcttcggcgatcgcggatatctcagaatccatcagcggtttctcagcacagatgaccgggatttccgctcaggcgaaacaagtcagtgaaagcgcgggagaaatcgccgacatttccgttactgtcaagggcatctcggatcaaagcaatctgctcggtttgaatgcggccattgaagccgcgagagcaggagaatccggcaagggcttttccgtggtggcggatgagatccgcaagcttgccactcattcaaaagacaatgtcggccaaattgaccagattacgaaaaaaattcacagcctgctgaaagggctggaggactcaattgaatccatcaaccagaacacggacggtcaagcggcggcggtagaacaaatttctgccacgatgcaggagatttcgggaagcgcccagcatttagcgaaaatggctgaaaacgtgctcggagaatcataaaaaagggagcttacgggctccttttttgttttcccttatcaatcggaaactgcacttacacgtttgatccgtcatgctcaggggtacacatacgaatacatcaccaatgataaaggagagtcttgtatgtctgatgcaaatctgcacaacccgctgacgaaatatgatcatgatgaatttccaaaacaatatcaagaaccgcccggtttgcagaaagagatgaagcctgtgccggactgcggtgaaacaagctataaaggagccggcaagctgaagggaagaaaagccctcgtcaccggcggcgattcaggtatcggccgggccgccgcgattgcttatgcccgggaaggggcggatgtggccattaactatctgcctgaggaacagccggatgccgaagaagtgaaagcgttaattgaaaaagagggaagaaaagctgttctgctgccgggagatttaagcgatgaagcgttttgcggagaattggcggaaaaagcgtatcaagagcttggcggtcttgacacgctcgctcttgtcgccggcaaacagcaggcagtggatgatatcagcgatcttactacagaacaaatctatcaaacatttgaagtcaacgtattctcgctgtattggctcgtcaaagccgcgcttccgtatctgccggaaggcgcgtctattatcacgacaacgtccgtagaaggttataatccaagcccgatgctgttggattatgctgcgacgaaacatgccattatcggttttaccgtcggcctaggaaagcagctggcgaataaaggaatcagagtcaactcggtagcgccggggccgatctggacaccgctgcagatttcgggaggacagcccggagaaaacattccgaaattcggcaaggaaacaccggccgttccattaaagcgtgccggacagccggcggagctggcaggaatttatgtctttttggcctcagaagaatcaagctatgtgacatcccaaatttacagtgtaagcggaggaattccgacagcgtaatcaaaaaggagctgcccttcatacggggcagctcttttttttgatgttatgtgccgagcacgttttgattatacaggacactcggatgtgacggatgataggaggcggctttgtcgttatgaatcttcgctttttctctgtcgccgagctgccagtggcagacgcagagctgcagatgggggtaccaggtggaatattcgagctgggtaaagcctgcatcactgcttttggcggatagggcgagctcataccaaaacacgccctgccggtattgccgtttctccgcaaaatagtcgccgagcctgcagcagaactccggccgcggacaatcgatcagaaatgattttaagagagacgtcatggcggcctcttcatggccgaccgccctgtagcaatcggatagatattggcacgttctgatctcgtcttcgatccagcactgttttgtggaaagaaaatggtgataatacgtgatggcgcgctgatactggccgtgatcctttaattcattcgcgaagtaaaacaaatcgcgcggtgtcatcgattcactgttttccgccattctctcataaatcttcaagttgcggtccgagggaggcgagtgctttttttcggatttccggtgtgtgacggcaatatcggtttctatgatgtttccgtatacctcaagatactcatgcacggctccgatccagcggaaccctttttcacgcttgacgagtcggttgcggcggtatctgaagctgacctctccccgatcatcaaagccgacgtgataatacatggataccgcgtccacctcttttgaaagcgacgccttcagttcaatcagcttttcacggtcctttaccgtcagcatatcgtcggcgtccagccacagaatataatccatttccgctttcgaaaacacaaaattacgggcggcggcaaagtgatcgatccattcaaaatcataaatcttatccgtataacgggccgcgatttctttcgtccggtcggtcgagcccgtatcagcaatcacaatttcatccgcaatgtctttgacggaatcaagacagcccgcaagcacttcctcttcatttttcacgataacgcacaaactgacgctgatcatgtcatcacctcttcccctccagtgtataaaaggagaggcggaaacattcttcggacaaaatgatctcttccaagaaatttgtctgtccttttactagttttattacagcgcctgatttaaaatgaacacatgaacttacgtgaggattgataggaaccatgagcatcataaaagcggaaaacctttataaaacatacggagataagacattattcgaccatatctcctttcatattgaagagaatgaaagaatcggtttaatcggcccgaacggaacggggaagtctacgcttctgaaaaccattgccggccttgaatcaacggaggaaggcgagattacggcttcaggaaacgtgcatattgagttcttgcatcaggaccctgagcttccggccggacaaaccgttcttgaacatatttattccggcggatcagccgtcatgagaacgatgagagagtacgaaaaagcgcttcaggcgctgaatgaagaaccggaaaatgaccagcgtcagaaacacctgcttgatgcgcaggcccgaatggacgcgaatgatgcgtgggaggcgaatacgttagccaaaacggttttaaccaaacttggcgtcaccgatctgatgaaggatgtcagcgagctgtccggcggccagagaaagcgcgtcgcgattgcgaaaaacgtcatccagccggctgacctgctcattttggatgaaccgacaaaccacttggacaatgaaacgattgaatggctggaaggctacttatcgcaatatccgggcgccgttatgcttgtcacgcacgacagatattttctgaacagggtgacgaacagaatttacgagcttgagagaggcagcctttatacgtataaaggaaactatgaagtattcctggaaaaacgggccgaacgggaggcgctggcagagcagaaagaaacaaaacgccaaaacctcctgcgccgcgaattggcgtggctcagaagaggagcgaaagcgcgctcgacgaaacaaaaagcgagagtggacagagcggaggcgctcaaggagcaaaaagggccggcagtctccggatcactcgatttcgcgatcggttcccaccgtctcggaaaacaagtaatcgaagccgataacgtctccattacctataacggccaagcgctgatcagccagtttaatgagcttgtcatccctggggaacgaatcggcatcatcgggccgaacggaatcgggaaaacgacacttttaaacagcctcgccggcagaattcagcctgacagcggcaatatcaccatcgggcagacggtccggatcggctactacacccaggatcacagcgaaatgaacggcgatatgaaagtcattgaatatataaaagagacggccgaaatcgtcaaaacggcggaaggcgatgtcatcaccgcggaacaaatgcttgagcgttttctgttcccgcgtccgatgcagcagacatatatcagaaagctgtcaggcggggaaaaacgccgtctgtacttgctgaatgtactgatgcaggagccgaatgtgctgtttttagatgaaccgaccaatgatctggacacagaaacattaagcgtgctcgaggattatatcgaacagttcccgggcgtcgtcatcaccgtatcccatgaccgctatttccttgaccgcgtcgtggaccgcctgatcgtatttgaaggacacggtgtcatttcccgtttccaaggttcatacagtgaatacatggaacaagcaaaagagaagaagacggcggtaaaacagccggccgaagagaaaaaggcggaagaagagccgaagaaaaagcgcaaaaagctttcgtacaaggatcagatcgaatgggacggcatcgaagacaaaatcgccggccttgaagaaaagcatcagcgtctggaagcggaaatcgctgaagcgggaagtgatttcggaaagatacaagaactgatggccgaacaggcaaaaacggctgaagagcttgaagcggcgatggaacgctggaccgaattgtcactgatgattgaagaacttgagaattaagaaaagccggtacggcccccgagaagatggcgggtcataccggctttttttatcttacacagatgtctcccggcgctttaaagacaaaggttccgtccaagccaagtttatccggcataaaaagtttacgtttacgttaaggttcaaatggtgtataatagaaacagatacgacaagagggggattcaccttggaatggatgaagattgatcaagttgccaagcgaagcggattgacaaaacgaaccattcgtttttacgaggagattggtttgattcctgctcctaaacggacagaaggcggcgtccggctttactctgaagatgatatggaggagctcgaaaaagtcaccagcacaaaagaagtgctcggtttttcccttcaggaacttcagcagtttatggagatgagccgtcagctggaattaaacaaagaggggtacttgttgtcactggatccgaaggaacggaaagaaaagctggaagagattcagcacgctttgaaccaccagcttgagatgattgatgagaagatcagcacatttcagcattttaaaacgcgccttaacggaatgaaagaaaaagctgaccgcgccattcaatcaatcgaatgattttgctgtaaacgctatggatatagcgtttcttttaatggataaaacaggaggtctggtcaaatggatacatcatcacaacagaaaacaggcttattcagccagccgaaagccgtttgggcggttgcgtttgcctgtgtgatttcctttatgggaatcggtcttgtcgatccaattcttccggcaatcgccgcacaattacatgcttcacctagtgaagtatctctgttatttacaagttatttgctcgttaccggttttatgatgtttttctccggcgcgatttcaagccggatcggcgcaaaatggacgctgcttctcggacttatttttatcatcgtgtttgccgctctcggcggaagctcaagttcaatcgctcagcttgtcggctatcgcggcggctggggacttgggaatgctctctttatttcaaccgcgcttgccgtcatcgtcggtgtatctgtcggcggcagcgccaaagctattattctgtatgaggccgcgctcggactgggaatttctgtcgggccgcttgccggcggagagctaggcagcctttcatggcgcgctccgttcttcggagtgtctgtcctgatgtttatagcgctttgcgcgatttcactcatgctgccgaagctgccgaaaccggcgaaacgcgtcggtgtgtttgatgcgatgaaggcgctcaaatataaaggccttttgacaatggcagtatctgcattcttatacaactttggattttttattttgcttgcttattctccgttcgttctggatttagatgaacacggtctcggatacgtcttcttcggctggggccttctgctggcaattacgtcagtctttacggcgccgctcgtgcataaagcgctgggcacagtgcgttcgctcgtcgttctctttatcgcctttgcggccattctcgttattatgggggtctggactgaccatcagacgttgatcattacatgtatcgttgttgccggtgctgtcctcggtatggtgaatacgatcatgacaaccgctgtgatgggtgctgcgccggttgaacgttccatcgcgtcttcagcctacagctcagtccgctttatcggcggtgcgctcgctccgtggattgcgggaatgctgtcagaacacttcaccgcaagcacaccatatacagtaggcgggattgtcgtttttgtcggcatgcttgttcttcttatgggacgcaaacatcttgccggaataaaagccggacattaaaaaaaggaacttccgcacgggcgggagttcctttttgtgtttacagcactttcgtcgtccaagattcacaattccatgtttccgtcgcgatatccatgtagaactcgggttcgtgggaaatcagcagaatggagcctttgtattctttcagcgcgcgtttcagctcttctttcgcatcgacatccaggtggtttgtcggttcgtcaagcacgagcaggtttgtttctgaattgatcagcttgcacagtctgaccttcgctttttctcctccgctgagaacggagacgcggctttcaatgtgtttggtcgtcaggccgcatttggcgagggcggcgcggatttcgtattgggtaaaggaaggaaattcgctccacacttcttcgatgcacgtattgttattggtttctttcacttcctgctcgaaatagcccgtgtattgatgctcgccgcgctccaccgtgccttccagcggctggatttcaccgagcaggctttttaacagcgtcgttttcccgatgccgtttgcgccgtacagggcgactttctgtccgcgctccattctgagattgagcgggcgtgacagcggagtatcgtaaccgatgactaagtccttcgtttcaaaaatgagcttgcctgacgttctcgcaggcttgaaatggaattccggtttcggtttttcggccgccagttcgatcatatccatcttatcaagctttttctgacgggacatcgccatatttctcgtgctgacgcgggctttgttgcgggcgacgaaatctttcagctcagccacttcctgctgctgttttttgtaggcggcttcgagctgctgttttttcacttcgtagacttccataaactgatgataatcaccgacataacgcgtcagctcttggttttccacatgataaatcaaattgattacgctgtttaaaaacggaatgtcgtgagaaattaagatgaacgcattttcatattcctgcaaatagcgtttcagccattcaatatgctgttcatcaaggtagttcgtcggttcgtccaacagaagaatttccggcttttccaaaagcagtttggcgagcagcactttcgtccgctgtccgccgcttaagtcagtgacgtcgcggtctaggccgacttcctgcaggccgaggccgcgggcgatttcttcaactttgctgtcaatcacgtagaaatcattgtttgtcagggcgtcctgaatgacaccgacatcttcaagcagctgctcaagctcatcagggtccgcttcgcccattttgttgtaaatctcgttcatttcttcttccatcgcaaataagtaatggaacgcatccttcagcacgtcgcggatcgtttttcctttttcaagcacggtatgctgatcgagatagccgacacgcacgtttttcgcccattcaaccttaccctcatcaggctcaagctttccggtaataatattcataaacgttgatttaccttcgccgtttgctccgattaagccgacgtgttccccttttaaaagacggaacgatacattgttaaaaagcgcacggtcaccgaagccgtggcttaaatcttttacggataaaatactcatcattacacctctatcgttatcagacacgctttttttatcatgtgtctttctcatttatgattataaaggaggagaccgtttgttaaaaggcttggaaggaaaaagaaaattgcgtttgccgcgtgcatttgagatactatggagtagattttaagaattgaggagaacgacatgacccaaacatggccatttttacagcatacacaaccatttatcgccgaaaactgggaggcgtcaggctttcaggagccgaccgttattcaggaaaaagccgctcaggtgatcatggaagggaaagacgtcattgccgaatccccgacgggaacgggaaaaacattggcgtacacgcttccggttctggagcggatcaacccggaacagaaacatccgcaagtgatcattttagcgccgtcccgcgagcttgtgatgcagatttttcaagtgattcaggagtggaaaaaaggctccgatcttcgcgctttgtctttgatcggcggggcaaacgtgaaaaagcaggtggagaagctcaaaaataaaccgcatatcattgcaggcacaccgggcagggtgctcgaattgattcaggcgaaaaagctgaaaatgcatgaagtcaagacgatcgttcttgatgaagcggatcagctcgtgacaaaggaacaccgcgaaacgatgaaaaaaatcattaaaacgacgctgaaagaccgacagcttttaagcttttccgctacgctgcagccggagacagaagaggtgctgaatgccatcgcacatgaaccggccgttttgaaagtggcgcggaatacggcggaaaaagcgcgcgtcacgcatcaatatctcgtctgcgatcagcgggataaagtgaagctattgcaaaagctgtcacggctgaacggcatgcaggcgctcgtgtttgtcagagatatcggaaatttaagcgtctatgcggaaaaactcgcctatcatcacgtggatctcggcatcctgcacggagaagcgaaaaaaatggagcgggcaaagatattatcagcgtttgaagggggagaatttccgctgcttctggcgactgacatagcggcgcgcggacttgatatcgatgatcttccgtacgtcattcacgcagacatcccgaatgaagacggatatatccacagatccggccggacggggcgggccggtaaagaaggaaccgtactcagccttgtcacgccgatggaagaatccaaattgaaaaaaatggccaaatcactcggaattgagctgaaagaggccgtttattcaggcggaaaattatctgagaaataagaaacggagggcgggaagcccttcttttttattgtgaaataatagaaaaggttcaggcgggggcgggaagatggtttcaatagaccgatttcaaatattgaaggtacgtgagctgaaaatacttgaacactggtttaagaacgataatatcagacggagaatggatgcgatgcggccactaaatgcatggtatgcacgattgagtaaagatgaagacgatactgtcattatggcatatgacgggcagcttccggcaggaatggtctctatagagtttgtggaggaacgggcgtatatcggattgatcgtcaatcctttgtaccagcttcaagggtacggaaaacagatcttgcaaaaactgctgactgatcctgggtttaccggcgtgcgggaatgggcggcaagcatctaaaaagacaatcaaatcagtttagtctgctttcaagcagcgggattcactttggaaaatacggagcctgatgaagacggctttcttactttgattcttcgcggctgatgcgaaaaagcagaaaaggaggggacaaagccctccttttttcatcatcatgttaacctagatcactgactttgatgatctgtttgcctttgttttctcctttaaacaaaccgaggaacgcgtcaggaatatggctgaatccttccgtaatcgtttcttcataatgaagcttcccgtccttgagccattcggccaattgtttcgcgccttcggaaaagcggtcagcataatcactgacgatgaacccctgcatcagcgcttttgttttgatcagcttcggctggacgcgggggcccatgtcttcctcttcactttcggtattatatgaagagatcgctccgcataccggaatgcgggcgaattcattcagcaggtttatcaccgcatctgaaatcggtccgccgacattgtcaaaatagacatcgacgccgtcagggcatgcctgttcaagcgctttttgaatatcatccgccgttttgtaattaatggcttcatcaaattgaagctcctctttaagatacgcgattttttcgtcagaaccggcgatgccgacaacccgcgcgcctttgattttggcaatctgcccgaccgttgagccgacggcgcctgcagcccctgaaacgacgacggtttcgccttttttcggacgcccgatatcaagcaggccgaagtaagcggtcagtccggtcatccctaaaatgccgagatacgcctgggcgggtgcgatatccgtatccaacttgcggagggcggactcattgacggctgaatattcctgccatgcgagatttccgatcacaacatctccttttttcagcttatcgccgtctgtcagaacttcggcaatcactccgcctgttatggcttcatctaaagcgaacggctctacatatgattttgtatcctgcatccgtccgcgcatgtacggatcaacggacacataactcgttttcacaagcacttcgccgtctttcggttcgggaacggcaatcgtttcaaagcggaaatcgtcatggacgggaacgcctttcgggcgtcttgccaattgaatctgctgctgattattcggcatactgaatcctccttcaagataagtggttgttccaaatgtaacacgaaccatttcccgaatacaaaatcaaaccgtccgccggcaacaaaaaaagaagggccagggcccttcttttcttatatgcgtatttaaaagaataaccggtacacatcggtgtttttctcatgttccaaatattcataggcattcgtttttgaagaatgaagcatgtcagaggtaatcacgggctgaagcgcggtcagataagaacccagcttattttcaatttctgtcggcagaacggattcgatatcaccgatattgataatgatagagaaaacgaaatcgatattaatatgaaaagtatcttcagcaaaggccgtaagctcttttattccatccgggcagcgggtatgccggcggaatacctgcttcactaaatcactgacaacccaagcgttaaatcgctgttccggtgaaaagtaatgaataggaaccacctccctgcttaatcggctcatgaagatttttatttttctgataaaagttactttccctactgtaacatgtcccgccggaaaatatccaccgacaatctgcccgttttttcccggaactctctttcttttgtttgacctttggttgagcgggtaaacatccaatatacaaaaacaaaagggaggacttatcaatgaaaccggtagtaagagaatatacaaatgatcaaaaactgatgcaggacgtaaaagagcttcagcaattgggtgtcgcaaaagaagacgtatatgtgctttcacatgatgacgacagaacggaccgtctggcggataatactgatgtcaataccatcggagcgaaagaaacgggcattaaacacgcggtcggcaatatgtttaataaaaaaggcgacgagctccgcaacaaaattcacgaaatcggcttttcagaagaggaagcatcacaatttgaaaagcgcttagatgaaggaaaagttcttctgtttgtcacggataacgaaaaagtaaaatcatgggcgtaagctgaacagatcccaaggggttttcggtcccttgggatttttttgcggtttccgcaataaaaccgaaaggcacatgctgtacattttcggtgccgtttctcaactgatttgatacaatccaattgtaataaattggaacagagaatcaggaggagcacaattcatgaaaaaaatgttacttatgctggcggtttgtttatgtatgatccctgcggacgtctatgccgctgacctgggacggcagacgttaggaacaaatgacggctggggagccgcttccggcgggacaaccggcggcgcgaaagcctctttatcgaatgtctacaccgtatcaaacagacagcagctcgtttctgcattagggggaagcgccaacagcacgccgaagattatttacatacaaggcacaatcaatatgaatacggacgaccggaataaaacgctcggctttaatgattataaagatccggcatatgatctcaacgcttatctgaaggcgtacgacccggacaaatgggggaaaaaagcgccgtcaggcacccaggaagacgccagacagcgatctcaaaaaaaccagaaagcacgggtcgtgattgacattccttcaaatacgacgatcatcggttcgggttcaaatgccaaagtgacaggcggaagttttaatataaagaacggcgtcgacaatgtcatcatccgcaacattgaatttcaagacgcttacgactattttccgcaatgggacccgacggacggcagcagcggcaactggaactcggaatatgacaatatcaccattaacggcgcgacgcatatctggatcgatcattgcacctttaatgacggatcgaatcccgacagcggttttccctactattacgggagaaaatatcagcaccatgacggccagacggatatagccaacggggcgaattatattacattgtcctataataaatatcatgaccatgacaaaggctccgtcatcggaaacagcgacagcaagacgtcggatgaaggaaaactgaaggtgaccattcaccataactattaccagaacatcgtccagcgcgcaccgcgggtccggtacgggcaggttcatatttataataatttttacgcaggctctaaaagcgccgcatacccgttcagctatgcgtggggcgcaggccacgcgtcaaaaatatatgcccagaataatgtctttgaagtgccgggactggctgctgataaagtcatcagcgtcttcagcggcggaaaagcacttcatgaagacggcactcttttaaacggcgccgcaattaacgcgtcagctgccaacggattaagtcagtccgtcggctggacaccgtcattgcacggttccatcggctcatcatcaaatgtaaaatcagatgttatatctaaagccgggtcgggtatattaaaataataaacaagaagcacaaaggaaaatattcctttgtgttttttaattaacaaaaacgtttattaacttagttaagtagtaaaatgggatagggggatggaagacaacaaaataggaggagacctgtaatggcttcagaaaaagacgcaaaaaaacagcaggcagtaaaaatcattcctttgcttattactgttgctgtgggattaatcatttggtttattcccgcgccgtccggacttgaacctaaagcatggcatttgttcgctatttttgtcgcaacaattatcggctttatctccaagcccttgccaatgggcgcaattgcaatttttgcattggcagtcaccgcgttaacgggaacgctatctattgaaaatacgttaagcggatttggaaacaagacaatctggctgattgtcatcgccttttttatttcccggggatttatcaaaaccgggcttggcgccaggatttcttacgtattcgtacaacggttcgggaagaaaacactcggcctttcttattcactgctgttcagtgatttaattttatcacctgccattccgagcaacacggcacgggcgggcggcattatttttcctattatcagatcattatccgaaactttcggatcaacgccggcagacggaacagagcggaaaatcggcgctttcttattaaaaaccggttttcaaggaaacttgattacgtctgcgatgtttttgacggcaatggcggcgaatccgctgatcgccaagctggcccacgatgtcgcaggggtggacatcacatggacaagctgggcaatcgcggccattgtaccgggattggcgagcttaatcattacgccgctcgtcatttataagctgtatccgccggaaattaaagaaacaccggacgcggctaaaatcgcaacggaaaaattgaaagaaatgggtccgtttaaaaaatccgaactctccatggttatcgtctttttattggtgcttgcgctgtggattttcggaggaagcttaaatatcgacgcaacgacgacggccctgatcggattatccgttttgcttttgtcacaggtattaacatgggaggacatcaaaaaagaacaaggtgcatgggatacgctgacttggttcgcggcgcttgtgatgctggcgaatttcctgaatgagctcggcatggtgtcttggttcagcaatatgatgaaatcatctgtttccggtttttcatggattgtggcatttatgattctgattgtcgtgtattattacacgcattacttctttgcgagcgcaaccgcgcatatcagcgccatgtatgcggcatttctcgccgtcatcgtggcggcaggcgctccgccgctgttggcggcgctcagcctggcgtttttcagcaaccttttcggttcgacgacgcattacggctcaggagcggctccggtctttttcggagcgggttatatctcgcaaagcaaatggtggtccatcggctttatcctgtcaatcgtccatattgtgacatggcttgtgatcggcggattatggtggaaagtattagggttatggtagaagaaaaaaggcagactcaggtctgccttttttttatttctgtaaggaatgggaagggcctgcacacgctgacttcagtgcgaatagaatattgccggggtgatattatgagcagcggccgtaatcaatacatgatattgaaacagaaaccttacaaatatatgagcagacatatgaaacgccggtatgaacaattaccatgtgaacttgaaagtccggaaacagggacggaaaaacggtttccgtcttcaaatgaaaatcgatctgccttgtgcgtacccgggctgcgaggtcccgaaggcaaaagaggacccgccggctcccgcggtccgcaaggggaggcgggtccgccgggtccgcccggtccgcccggtcccccggggcctgaggggccgccgggagcggttcctgcggtagcttttcaaaatacagcagacctaatgacgcttccgttagaaggaacaccgataaacgtgttaagcgcagtgatagctgcgccgacagatcaattggtgaaaacggatgccgtcatacaagtaaatgtggaattagatccgcttgcgtctcatttctcattggtcttagctgtcgagctgcaaagaaatggcgtaacgatacaaacacagagacaagagcggaacctcttttcttcaggcggacaaatcataggaattccttttacgtacatcgacgaaatgaaggcggatgaaacagccgcgtatcagctctatttatccgtcctttcttcgaactacgtaacacaagtcgcagcagcaaaccgctccctcattgcgacgggattccccattcaaggatcggattaaggtgatgaaaagaaatcaccttttttatttaggttgtcaaaacacagcccgtattaatatgctgtcttaataagtaagacggtcaacaacgggaaggagagggaaaaagattgaatgaataatccgattataaacggaagctttgaaaccggcacattagcggggtggagttcggcaaatacccagattaacagtttgtttgcacattcagggagatattctgcgcaatttattggagctcagccatatgcttacctcagtcaaatcgttcccatttcagccaagtcagtgactctattcgtatcactcgcaacgctcggaaatgatccaagtccccaagtcactctccagatcatctatgtcagcgcagcaggtgaacaaatcagttccattcaagaaaatattacacccggaaatttgccgaacgtgctctttcacacatggtctgaaatctataaaacaagcagtgtgccttctggcgcggcctctgccgtcattgtattaagtaaagtttcttccggcacggttttaatagacgatgtttcattggcgcaaaccgggggtgaacctggcgtaacaggaattacaggtcccactggagtgacgggcccaacaggagtgaccggcgcaagaggagcgacgggagtaactggtgcaaccggggcaagaggagcgacgggtgtaaccggtccaaacggagtaactggtccgacaggagtaactggagcaaccggctcgactggtgtaacaggagcgaccggaaccacgggctcaaccggagtgactggagtaacgggagcaactggttcaaccggttcaaccggagcgactggggtaacgggtgtaactgggggaacgggaacaaccggcccaactggagcaacggggataacaggagcaacaggcccatccggagcaacggggataaccggcgcgaccggtataacaggtccaactggatcgacaggagaaaccggcccaaccggagtaacaggggcgacaggagaaaccggtccaaccggagcaactggttcaacgggagtaactggagcaacaggcccaacaggaacaaccggtccaactggagtaacaggagcaacaggctcgactggcataacgggaacaaccggcccaactggtgaaaccggagaaaccggggcgacgggagtaaccggatcaacaggagtaacaggattaaccggtgcaacgggatcgacaggctcgactggggtaacaggatcaaccggtgcaacgggagaaactggttcaacaggagtaactggctcaaccggtgtaacgggagtaacaggagcgaccggagtaacaggggtaacgggatcgacaggcccaaccggcccaaccggcccaacaggggcaacgggtgtaactgggggaacgggaccaacaggttcaaccggagaaactggtgtgactggcccgatcggggtcacgggatcgacaggagcaaccggggcgacggggataaccggctcaaccggagtaacaggtccaacgggggaaacaggcgcgactggctcaaccggtccaaccggctcaaccggtccaataggagttactggcgcaaccggagaaactggcccaacaggagtgactggtgcaacaggctcaaccggagaaaccggctcaactggtgtaactggttcaacaggagaaaccggtgcaactggtgtaactggttcaacaggagaaactggagcgacgggagtaaccggatcgactggcgcaacgggatcaactggagtaacaggatcaacgggagaaacgggcccaactggagtaactgggacaacgggagaaaccggagcaacaggatcgactgggttaactggtgtaaccggatcaacaggctcaactggttcaacgggagtgacaggttcaaccggatcaacaggcgcgactggctcaacaggagcaaccggcccaaccggagtaacgggatcaacaggagcaaccgggtcaactggagtaacaggtacaacaggcctaacgggtgtaacgggtccaacaggagtaactgggacaacggggataaccggatcgaccggggtaacgggaccaaccggaccgacaggatcaaccggctcaactggtgcgacgggattaactggagaaaccggcgcaaccgggggaacaggttcaactggttcaacaggagcaacgggatcaaccggtccaaccgggccaacagggtcgacaggttcaactggagttactggtgcagcaggatcaactggacccacgggagagatcggtccaacgggatcgccaggctcaaccggagaaaccggtgcaacgggagctactggagtaaccggcccaacaggggcaacgggtgtaacgggagcgaccggagtaacaggggtaacgggatctacaggctcaaccggcccaaccggcccaacaggggcaatgggtgtaactggagaaatcggcgcaactggagagaccggtccaactggatctacaggttcaaccggaataacaggggcaacgggttcaaccggaccgacgggctcaacgggagaaaccggtgcaaccggtgcaacgggagtaacaggagaaacaggcgcgactggctcatcaggctcaactggagtaacaggagcaacgggatcaaccggcccaaccggcccaaccggaataacaggtccaaccgggggaacagggtcgacaggtccaaccgggggaacagggtcgacaggtccaaccgggggaacagggtcgacaggtccaaccgggggaacagggtcgacaggagaaaccggcccaactggctcgaccggggatactggagctactggagtaactggagctactggagtaactggtgcaacaggagaaaccggagcgactggtgtaacaggcccaactggttcaaccggagaaaccggggcgacgggagtaaccggatcaacaggagtaacaggatcaaccggtgcaacgggagaaactggcccaacaggagtaactggctcaaccggcccaaccggtgtaacgggagtaacaggagcgaccggagtaacaggggcaacgggtgtaactgggggaacgggcccaaccggaccgacaggagaaaccggcgcaaccgggggaacaggttcaactggttcaacaggagcaacgggagtaacaggagcaacgggatcaaccggtccaaccggtccaaccgggtcgacaggttcaactggagttactggtgcagcaggatcaactggacccacgggagagatcggtccaactggatcgccaggctcaaccggagaaaccggtgcaacgggagcgactggggtaactggtataaccgggggaacgggaacaaccggcccaaccggagcaacgggggtaacaggcccaactggtgaaacgggtgtaacgggagtaacaggatcaaccggtgcaacgggagaaactggcccaacaggagtaactggctcaaccggcccaaccggtgtaacgggagtaacaggagcgaccggagtaacaggggtaacgggatcgaccggcccaaccggaccaagcggcccaaccggcgcaacaggggcaacgggtgtaactgggggaacgggcccaaccggaccgacaggagcagccggctcaaccggctcaactggtgcgacgggaataactggagaaacaggcgcaaccgggggaacaggttcaactggtttaacaggagcaacgggaccaaccggagtgactggagcaacaggagccaccggtgcgacggggataaccggctcaaccggagtaacaggtccaacgggagaaaccggtgcaactggagtaactggagcaaccggggaaactggctcgaccggggataccggagctactggagtaaccggcccaacaggggcaacgggggtaactggagagaccggtccaatcggagcaacgggttcaaccggagaaactggttcaacaggaacaaccggggtgacgggagtaaccggatcaacaggagtaacaggttcaaccggtgcaacgggatcgacaggagcgactggggtaactgggacaacaggagtaaccggtgcaacgggagaaacgggaccaaccggagccacgggagtaactggttcaactggaataaccggatcgaccggtccaaccggtccaaccggcccaacaggtgtaacaggagaaaccggagtaactgggacaacgggagaaaccggtgcaactggagtgactggagcaacggggataacaggagcaacaggtgcgacgagcccaaccggtgtgactggaccaacaggggttactggctcaacaggagaaaccggagccacgggctcaactggagtaactggagcgaccggtgtaactgggtcaacaggaataaccggaccgactggctcaacgggagaaaccggctcaaccggtgcaacgggaataactggagaaaccggagcaaccggatcaactggcccaaccggagcaacaggtgcaaccggagtaacgggatcaacaggagcaaccgggtcaactggagtaacaggtacaacaggcctaacgggtgtaacgggtccaacaggagtgactgggacaacggggataaccggagcgactggggtaacgggtgtaaccgggggaacgggcccaaccggaccgacaggagcagccggctcaaccggctcaactggtgcgacgggaataactggagaaacaggcgcaaccgggggaacaggttcaactggtttaacaggagcaacgggaccaaccggagtgactggagcaacaggagccaccggagtaacgggtctaactggtgtaacgggatcgacaggagcgactggggtaacgggagcaaccggccccaccggagtaacgggtctaactggtgtaacgggatcgacaggagcgactggggtaacgggagcaaccggccccaccggagtaacgggtctaactggtgtaacgggatcgacaggagcgactggggtaacgggagtaaccggctcaactggtgcgacgggattaactggagaaacaggcgccacaggatcgacaggcccaaccggcgcaacagggccaacaggtttaacaggatcaacaggagcaaccggaaccacgggctcaactggagtaacaggagcgacaggagaaaccggcgcaacaggggcaacgggggtaactggagaaatcggaccaactggctcaaccggtgcaactggctcaactggctcaactggctcaactggctcaaccggcgcaaccggagtaacgggtccaactggcgcgactggctcaaccggcgcaaccggagtaacgggtccaactggcgcgactggctcaacaggagaaaccggtgcaactggatcgactggcgcaaccggtccaacgggtgtgactggagcaacgggagaaaccggctcaactggcgcaacgggtgcatccggggcgaccggcgcaacgggaataactggagaaaccggagcaacaggatcgactggggtaactggtgtaaccggagcaacaggctcaactggttcaacgggagtgacaggagcaactggttcaacgggagtgacaggagcaactggttcaacgggagtgacaggagcaactggggcaacgggggtaactggagcgaccggtccaaccggatcaactggttcaacgggagtaactggagcaaccggatcaactggttcaataggagaaaccggagcgaccggtgtaacagggtcaacaggaataaccggtgtaactggctcaaccggcccaactggtgaaacaggagcgacgggagtaacaggcccaacaggtgtaacaggagaaaccggaaccacgggatcaaccggagtaactgggacaacgggagaaaccggtgcaactggagtgactggagcaacggggataacaggagcaacaggcgcgacgggcccaaccggtgtgactggaccaacaggagaaaccggttcaacgggtgtgactggagccacaggagcaacaggatcgactggggtaactggtgtaaccggatcaacaggctcaaccggagtaacaggggcgacaggagtaacaggggcgacaggagaaaccggagcgactggcccaaccggagcaactggcccaaccggagcaactggggcaacgggggtaactggagcgaccggtccaaccggggtaactgggacaacgggagaaaccggtgcaacaggagtgactggagcaacggggataaccggagcaacaggcgcgacgggcccaaccggtgtgactggaccaacaggagaaaccggagcaacgggctcaactggtgtaaccggtgtgactggatcaacagggttactggctcaaccggagaaaccggttcaacgggtgtgactggagcaacgggtgtgactggagccacaggagtaacgggatcaacaggagccactggagtgactggggcaacggggataaccggagcgactggcgcaacaggagtaacaggttcaaccggagaaacgggtccaacaggagtaacaggggccactggagaaactggcccaacaggaatcacgggtccaacaggagccacaggagtaacgggatcaacaggagccactggagtgactggggcaacggggataaccggagcgactggcgcaacaggagtaacaggttcaaccggagaaacgggtccaacaggtgtaacaggactaactggagcaacgggagtaacaggcccaaccggtccaacgggtgtgactggagcaacgggtgtaactggagcaacgggtgtaactggagcaacgggtgtaactggagcaacgggtgtaactggagcaacgggtgtaactggagcaacgggtgtaactggagcaacgggtgtaactggagcaacgggtgtaactggagcaacgggtgtaactggagcaacgggtgtaactggagcaacgggtgtaactggagcaacgggtgtgactggagcaacaggagccactggagcaactggagtaacaggagtaactggagtaacaggagtaacgggtgcaaccggagtaacaggcccaaccggtccaacgggtgtgactggagcaacgggtgtgacaggagcaactggagcaactggagcaacgggagtaacaggagcaaccggagtaacgggagtaacaggagcaaccggagtaacgggagtaacgggagcaaccggagtaacaggagcaacgggagtaacaggagtaacgggatcaaccggagtaaccggggtgactggcccaactggagtaacgggcccaaccggaccaaccggcgccacaggcagtacaccaaccttgctcttcacaagaaccaacgggccgctcactgtttatccgccgttaaatacagaagttcccgttgctacgctggcaatcccagttaatgctttgcagaatgtaaagctggattatgcactcagtgccgcgttaacaactgcagcgaattcaaactttgtttttgaagtgagattatataggggagcagtgcaaattcatacaagaactctgtcgcgaaccagtactctcgcagctacggatagtttttcgattgctgatacaacagtggatactgcgccgaccgcaggaacgaacacttaccagctcagggttattttcacaactgctaataatttaacgacagcaactgcactcaatatcgattttaacagcataagttttccgacaacctaatacaacagcagactgatattttaaagatgaaagacctgacttatgcacagttaggtcttttttctgtaaaatgctgtgcatgatgcagtcttaacgaacatttgaaaaattgcccaatagaagtggggttttgccacaccttttttctctgtggaaatattatgaaaatagaggtggtgtaatgagaaaaggagatacttggtataacagatacgattcttgggattacgactgccgaaattgtaatgagtgttgctgtcattttcaacataaaagaagaaatcaaaggcgcagttatcaaaatcgggcacattgctgtgaaggattctgttgcgaacccccttgctgtcatgaaagatggtgtccatgctgtcatccaaatcattttcacgtaagaggattcaccggagcaacggggtgcaccggagcaacaggactgaccggagcaacaggactgaccggagcaacaggactgaccggagcaacagggctgactggagcaacggggttcactggagcaacagggctgactggagcaacggggttcactggagcaacagggctgactggagcaacggggttcactggagcaacaggactgaccggagcaacgggctcgaccgggaataccggagcgactggggtaaccggtgccactggagtcactggagatcccggcgccacgggagtaacgggagccaccgggataacaggcgctaccggggtaaccggagcgacaggagtaacgggagcgacaggaataacaggagccaccggggtaacaggcgtaaccggagcgattggagtaacgggagccactggagtaaccggggatactggagctaccgggataacgggcacgaccggagtaacgggagcgacaggaataacaggagccaccggggtaacaggcgtaaccggagcgattggagtaacgggagccactgggatcaccggagctaccggagtaactggggtaaccggagtaacaggagccaccggggctactggagccactgggataactggagccactgggataacaggagcgacaggagtaacgggagccaccggggtaaccggagcgactggagtaacgggggcaaccggagcgactggagtaacgggggcaaccggggctactggagtaactggggtaaccggagtgaccggagtaacaggcgcaaccggagtaaccggggatactggcgctacaggagccactgggatcaccggagcgactggagtaactggggtaaccggatcgaccggagtaacgggagtaacaggagtaacaggagtaacgggagtaacgggagtaacaggagcgacaggaataacgggagctaccggggtaacaggcgctaccggagtaacaggagcgacaggaataacaggtgcaactgggatcaccggagcgactggagtaactgggatcaccggagcgactggagtaactggggtaaccggatcgaccggagtaacgggagcaaccggagcaaccggggctactggagcaacaggcgccaccgggatcaccggagtaaccggagtaacaggcgctactggagcaacaggcgccaccgggatcaccggagcaggcgcgatcattccttacgcttcaggtcttcccactgccgtgacgaccattgccggcggattaatcggaacggtgagccttgtcgggttcggcaattctgtgacgggcgtcaatgtcggagggggaggtgcaattgatcttaccggggctggaggaactctgctgaactttgctttttctgctccgagaagcggaaccattacatcaattgccgcctatttcagtacaaccgcagcattgtcgcttgtcggctcgactgttacgataaccgcacaactatacagttctactgtgccgaacaatacgttcacgccgatccccggagcatccgtcactttagctcctcccctcaccggcgtattgtcaatcggcagcatcagcaacggaatcacgacagggctgaacattgcggtaactcctcaaacccggctgttaatggtattctctgccactgcgacaggcctttcgcttattaatacagtggcgggatatgcaagcgcgggggttacgatttcttaagtgagaacggccagactggtgcggatcatctaagctaagcttggagaagatatcattttttcttcaagcttttttgtttttacgtctttctgtaaaggctgacgggaatttcccgacagtcggcagaagtatttacatgccttttgaagttaatcagtatcttaatgaagacgttttcagtgagttcgaatcatccgttgtgccgggagtgtgaatcatcatcgaaacagcggtgccctcatccggggtgctggtgatcgtcaattcgcttccgcaaaaatgcttcagccgccgattgatatttttcaggccgacactgcgattaacatcagaagacaaaatatctttctgtatgtccggcatgatgccggttccattatcctccactttgataagatacgtgttttcgccttgttttttcgctgtcagctttatccgtccgccgcctcttttcttactgatcccgtgatgaacggcgttttccaccaatggctgtatcattaaaggcggaagggggaagtcaatgtcctgttcaatatcaaaaaggatatcaagccgtttgccgaagcgtgttttttctatagaaagatatgacgtaatgatagaaagttcgtttctgaatgagctgatgtccgaagtgttttgaaaatcaaaactcatccttaaatagtttgtaaatgcagcagtggtttcccttgctttttcaatatccaaatggctgagcgcgataatcgtatttaatacattgtaaagaaaatgaggcttaatctgcgactgaagaaatgccatttctaaatttgtggcttggtgagccgtatgcttcattaaaattaaatttttaatacgcgcggtgaattcagagtaatgataaggcttttgtaaaatgtcgtttgctccggcatgaaacgccttgtatttgtcatggctgataatggctgccgtaacgataagaaccggcagatcgaccatgctgaacctttcgcggatgtttgtgcagacttcaaaacccgtcatgtcaggcatcatcaagtctaatatgaccaagtcaagcttcgaggaagagacagcttgaagcgcctcttttccgctttttactgcgattacgttataaggaacaccttccagcatatcaattaaaattttcaaactctcgatattatcgtcgacaatcagaatcgtcggagcatcgattttctctgagtgataaggcgtgaccaacgaaatatccggtattctctgtccgggctgtgatttaggaagttcggtctttgcttccggtaaagaaacaatttgagcggcgggtaacgtaaaatgaaaggctgatccttgcgccgccgctgactccgcccagatgtccccgttttggagcttgacgagctgtttcacaatacttaaacctaaacccgttccatcttcttccttccctcccgcttgctgaaaagaatcaaaaatggtttcaagatcagcctcaggaatgccgctgccggaatcggtcacggttatttgaatcattttgtcattcaggtttgcggcggaaagaataatgttcccctcggatgtgtacttgattgcattttcaataagattggttaagatttgccggaatcggttttcatctgcaagcaccaaagggagatcgtccggcacatgattaagaatcgcgagttttttatgtttggataaaagccggtagaagttcatctcactgcatatgacggcatgcacatcgacgggaaccggacgaatctgcagcatcccctgcttcattttttccaaatcaagaatatcatttacgagatcggaaagtctgtagcccatacggatgatcagctgcatattttctttctcttcctctatcgtcttcttttttctgccggctacaagggtttggcatatattaataatgctgttcagcggcgtcttgaattcgtgtgaagttttggcgataaattcatctttcagttggtccattttgactaatttccgtgagaggacttcattgtcccggaaagctccggcgaattgctgcgccatcaggagaaccaccgccaataaagcgatgactgtcggcaatgaatagatcgaattaaaagaaaaagctgttttgccgctgtaagctgaaatggtcgtaagaatcacaaaagcgctcatcgagacggatgcgagtgtaaggtacgtgcttccttttatttttcttatggcggcaatcgtaaaaatatatgtaatataaaacagagtcgtaacggccagcacagaatgtaaaatgtatgagaggtgatcaatgaaacttccggacataaaatcagtgatcaagatgatcccggataaagcggttaaaatggtgatcgtcgtttttgaaacaatttctctgtatgcataaaagagataaagaaaaaccgccatgctgacaagcacggttgagatgatacgcaaggaattcagcaatgaaaatgaaatagacggaaagaggagaaagataattctttctttcccgatcataagaataatggctgaaaaaagcagacacatcacggaaaagaacaataaatgtttatcctttgtccgttgcagaaaaaagccgagaaaatataaaccggtaatgaaaaaagccgtaatcataatggaatcattaaaaaaggaaatttgattctcgcgtataatttgttcttgagtcccaaacgttatcggttttgcgatcccccagccgggaacttttccgaaattcgaaaaatgcaggacaagttcattgtcacccttgcgaagcctgaaaaagctgctgtacggtttgttctgcgccttaaaatcagctttttctgaaggattgccgctctgtccgattacttttccattaagataaaggcggtttgaactgtagatataagatgtgctgatccccaaaacctgattgtcttcatttgatcggattgtcagtttgtacgttccgtaatccacgtcggccgtttttccgaacagcttcacattgacagggacatcaacgagtacgggattttttccttttgctgaatgaagcgcctgcggtgacagcatctgatttggatatagaatccatttcccgttcagctggacatttccatccttttgaaaatcccaattttccagattgatcacgccctgttccgcttgagggagggatgatcctgaaaaatgatccatggccataaaaatcataaagaaagcagcatagccgcaaataatcgtaatcgaaataaatttttctttcacatcattactcctttatcccattcaggggcattctattatcctatttaatgtataaatattgtaatcacaaacgttataatacaacaagagaaagaaaaagaatccaactatatagggcattgggcatggtataattgaaattattttcagatatatctatattgacgggtgggatgcggtttgaaagcgttaattgtggatgatgaggaactggcattgcttcattttaatcgtatgcttgagcggacaaacgcctttcaatctattataacgtttcaagatccggcggaagttctggagcattcggaactttcagcagctgatgcggtgtttcttgacattgaaatgcccgggataaacggtattgagcttgctgaatcgattcaggaggtcaatgaaaatatccaagttatttttatcaccgcttataatgaattcgcgatcaaagcgtttgaattgaatgctgtcgattatctattaaaaccggttgacaatgcccggctgctgacaactgttgagcggatccgaatgaataaaaaactcaggtcggcggacgggaataccgggacggattatgttatacaatgttttgggaacctggacttttatcaatcggtaaatggtgtcaaaacatacataacagtcaagtggagaacatccaaagcccgtgaactgtatgcatttttacttcttaatcaagggcgcacggtcagtaaagacatgctaatggagatgttttggcctgcttatgatatatcaaaagcaagcacccagctctactcgacaatatatcagatacggaaattaatcggtaagctgcccttcagccaatcaatagaaaatactgatataggatacattctccggctttccggggtaaagattgatacagttgaatgggaaaaaacattcaaagaggctcctccgctcagcgcagctgcactaacccggcacatgaacatggtcatgtcatatgagaaccattatctcatggagaatggctatctgtgggcagagccggaaaaagcgcgtcttgcccatctgtggctcagcaaagcgtacgaactgattggttttctcatccaagagaagaacgatcgtcaagcgatggacgtttgcctgcaggttgagaaaatagagcccggtgacgataaaattatacaatacaaactgcagttatttaataaactgggaaaggtagaagaggcgataaaggaatacgaacgatataaacaattaaaagataaaatcaattgacgattgaatgaccggaccggctgatgccggtctttttttgtgcgctatttctgaaatgatcccatgtacagaatttgtataggccgatttcatacaatgtagtttggttcggataaggagaatcccatgcttaccggcttgttcgaacgtaagtctatataaaaggggaggaataagacattgggagtgaggaacttttcgttcagcccgaaaaaaagcaaaaggctgagggcggcattgatttcatgcttcacgctgtttttcatcttcagccaagttgtcagctttactccgatcgcagccgcttccggatcacaacatagcgagagcgggttctttgattcagttgcagtcaaagacggcagacagcagaccgttgacggatcaaaagccggtgaaccggctttaacaccgggagataaagtgacactgacatacgaatggtcactaaaacacaaagaagatgcaagtgaccggaatatcaccgtaaagattccggaaagttttacattagataatgatgccgaaggtgagctgaaatcagctgatcgggtgatcggtatatataaagctgaagcaaacagaagcacgctggaagtgaaagtgaacgatgctgaagcggatgccggggatgccaaaggctccattacactgtcggcgaagtttactcccgacataacagatgagacgaaaatggcaaaagctctttttcaactggatgccggcaagacccagcaagtgttaatacctgtgaagaaagacggaacaacggattccgatacagaaaaaaacacctcttcaacacctgctgaacctcaggataagacagagaaaaaatcagcatctgcagacggcggggataaagcagaacaggcaacgaaatcaaaaccttctgctaaacgcagtcaatcaaaaatggtgattacaagcaaatctgccgctaaaagccttcaatcaggcggaaaccggattacgcaaaatattttaactgatgtgaaattgacggatgaaaaaggaaaaccatatgacaaaaacaaccctgcgaatacgaactctccggcgaatatcaccatccaatgggcgattccgaatgagctggggaaaacaataaacgacggtgatcgatatgaatttgacctgcctaaagaatttattatgcataatgacattacgaaccagccattgaccgacggcgatagtacgtacggaactttttccattaatacgagcggccatgtcatcatgacgtttaacggcgaggtaaaagaagattctaacgtcaaggggtcattgtatgtaaacacccaattcaatcagaaagaaataaaaggatcaaccacacaaaagattaagtttccggttaactctgatacgccggacgtaacggtttattttaaaccgaatgtcaataaaaccattgagaaatcagggtcattggataaaggcattaatcccggaaaggtaacgtggacggttgaccttaataaaaaggaagaagaagttaaaaatgcgaaattgactgaaagccttccggacgaattgactttccgctctgtgaaagtgtatgaacttgatgtgaatattgacggctcggtgagtcagggaaatgagataacttcaggttataccgttggcgaaaacggtaatgtcaccttcgccgggacaattgattcagcctaccggctcatatatgacacggaaattaaagatgaggcaaagccgggtaaaggcggaaacatcacgctgacaaacaaggcggcattcagcggagacaatgcggagccgatttctgcggaagcttccgtaacagcgggttacggaaaaatgatagaaaaatcttcgacaggttataaaggagaaacccaaacgttcagctgggctgttatgtacaactacggtgagaaaaagattgatcaatccaaagccggcattaaggatacgttcggatcagacgatctgcatctagttcccggatcattgaaagtccttccgattacattcagccagaacggcagcgaacaagagggcgccccattaaaagagggtgatgattatacgctgactgataacgggaacggctttgaaataaaattcaagcaaactgtcacaggagcatataagatcatttatcaatctcaagtcaacgatggggtcattattgacagtcctgtcaaatacaccaatacagcaatgacagatacgggggactcaaaggaaactccgggaaccgccattcagcagaatctgatcaaacattattcaaacgcagactatgagaagaagacggttgattggacaatcacagttaacaaaaacggttacacaatgaaagactggacgctggatgatcaattcaccagcggaggcctggcgctcattgacgattcatttaacatgcaagacacgactgaaaacaaaacgctgaaagaaggaacggattatacattaacaaaaaaacccggaaatcaaggctttacaatagcattgatcggggactacgcagaaacaaacagtcagtttaagatcacgtataagacaaaattcaacgctgacttttcaaacgaaacgattaaaaatacggcggagtcgacatggaccgataaaaacggcaacaaacgcacaaataaggaatcgagcggcttcacaccgaacaatcagacgtcccataacggattcaaaaacggctcatacaacgccgtttcaaaagaaatcacatggaaagtcggcatcaattacaatggcgaaccttcaaaacatccttatataaaagatacgatcacagatggtcagcaatttttgcatgggtcggttgctgttaaaacgtataccatcagcaaaaacggctccatcactgaaggagaggcgctggatccttcaaaatatgaaatagaagagccgtcagacggcaacaaaaatacgttaaccgtacatctcaaaacagatgacgctgtaccatacctgattgaatttaaaacgtcattaaaaggccaggtcattaaacagaatcaatacacaaacaaagcagagtactttaataatgaccatgcagaccgaacgctgacgggttcagtttccgtcgcaaacggaggaaacctgatttctaaaggcggcaaacagaacggaaacaatatcgattggaacatcaatgtcaatgccagccaatcgacactggatgacgtaaaagtcaaagacacaccggatgagaatcaaataatagatgaagattcttttaaagtatatcaagcaaaatataatgagaacggcgttatgaaagacagcagcggaaatcttattccgggtgatgtgcagcttgagaaagataaggactataaattagatatgaaaactgacaatgccaccggtgaacaatcatttgcccttacctttacaggcggctataaacaaatcgaccgtgcgtatgtcatacaatatcgttctctcattaatatttccggcagcagcggtcaggtcaacaacaaagtgtcgatatcagggacgaatgttgaggagcagacccaagagaacaacagctcagtgtttgtcgctatttcaagcggcggcggctcagggtcaggggagaagggaagcctgacgatatctaaaacaggatcagacggaacatctctttcaggagcagactttcaattatggtctaaagacggcaagcagctgctgcgtacgggcacaacagacgatgccggtaaacttacgtttgggaatatccgttacggaacctatgtactgaaagaaataaaagcgccggacggctacaccatcagcgatgcttatgtaaacggggtctccgttacgattgacggcaaatcctccgcagcaggagcactctataaagtcataaatcaaaaaaataaggtgacgcttatcaaaaaagacgaaaacaataatcctttggccggtgctgtatttaagcttgagaaaaaatcaagcgacggtacctatactctgataaaaaataatattgaaagcgataaaaatgggaaagttgagatcaacggtttgcccgccggatactaccggctgatggagacgaaagccccatcagggtttatcgtaaacacaaaagccattcacttctcaatcgcaaagaacgaaaagaatcaagtacctgatgttgaattgggatcaatggtgaattataaaggaaaagccgctttaacgaagaaagatgcagacggcgggaaccttgaaggcgcagttttcaaaatcgtcgatagtgatggaaaaatagttcaggacgatctggtttcagataaggacggaaaagtagaaacatccggccttgccccgggtcattacgccttcatcgaaacgaaagcgcctgacggctatgtgttaaatacggagaaagtggagtttaccatctcagaaacagcggaaggaaagccggagtcaactgacgcaggaacggccgtcaactataaaggctctgtgttgctgacgaaggaagatgcggaaggccgaaaccttgaaggtgcagttttcaaaatcgtcgatagtgatggaaaaatagttcaggacgatctggtttcagataaggacggaaaagtagaaacatccggccttgccccgggtcattacgccttcatcgaaacgaaagcgcctgacggctatgtgttaaatacgaagaaagtggagtttaccatctcagaaacagcggaaggaaagccggagtcaactgacgcaggaacggccgtcaactataaaggctctgtccggctgacgaaggaagatgcggaaggccgaaaccttgaaggtgcagtcttcaaaatcgtcgaccgtgatggaaaaacggttcaggacgatctggtttcagataaagacggaaaagtagaaacatccggccttgcacccggtcattacgcattcattgaaacgaaagcgcctgacggttatgtgttaaatacggagaaaaaagagtttaccatctcagaaacagcggaaggaaagccgaagccgtctgagaccggcacctttgtcaactataaaggctctgtccagctggttaagaaggatcaagacggaaacgttttagacggtgcagtatttaaaatcattgacagtgatggaaaaaccgtaagagaagatctgatgacaaaagaaggcggcaaaattgacgccggcggtttggcgcccggaaactatcaatttgttgaaacaaaagcgccggatggttatctgctgtcaacaacccctgtgcggtttacgattaaggctgagaacagcggaaaaccggatcaggctgccctgactgcagttaacatcaagaacagtgttgttcttacaaaattggatcaaggtgacaaacggaaagtcctgcaaggtgcgaagtttaatctgacagatgcaaacggcaaagtgctgagagaaggtctgacgacagatgagcacggacagattgttgtacggggactgaaagcaggcgaatatcaatttatcgaaacaaaagcgcctgaactttacagtttggatcaaacgccaatttcattcaagatcacaaataccgacataaaaccagtcgaaatcagtgcggagaatacactgacgccgggtgatgtaacactgacaaaagtggatcatgacgataaaaataaggtgctggaaggtgctgaattcaagataacggattctgccggacatccggtaaacaccggcggcagcaaagaacggccggcggtatggaagacggatcaaaagggccggtttacggtgaaaggattagcgcccgggcagtatcgatttatcgaaacaaaagcgcctgacggctatcagctgaacgaaaaaccaattgaattcacaattgaaaaaggacaatcaaaagctgttgaggtcgtcgtttctaataagaaattaaaaaatcccgcacctgggaaagacacaccgaatcatcaaacgaatcaaggcgggcatcaccctgataccaatagtaaaaccaatcacccggatacaggcaaaaatctgccgaaaaccggtgatacggacggtatgatgccggtcacggccggtattctgctgctattagccggcggagccgcggctgttgtatcaagaaagaagaaagcaaggaatagatagacgtaatcgcacctgatcatgtaagaatcgatcaggtgcttttttaaaaagagaatcatttctcaccaaatactcaccgcatgacgtacaagaaaggaattttcttcatggttaaaaaaatgatcattgccgttcttattttgtccgggctgcttctcatttcctctcctctcatgaaaggctgtttgattgcgtacctcagtaaaagccaaattgaatcggaattgaccgcagaacaagcgcggaaaaataacatgaaaaaagcggactatgaatttgaatccattcatccgcccggtttcagggaaacagttcagtcaagttttaatcgcaaaccgaaaccgataatcggacggataaccatcagcagcatcgatttagaccttccgattttaaaaggcacaaccaatgaaaacctgctgatcggcgcggcaactatgcgtccggatcagaaaatgggcgagggaaactacccgttggcaggccaccatctgaagcaggagaacctattgttcggccctcttttacacataaaaaaaggtgcgcaaatcgtgattaccgactttagaaaagactatatttattctgtaacatcaaaaaccatgatttcagaaatagaagcaaacgcaattcaggagacaaaagataaagagattacattaatcacatgcgacaaggcggtaagaaccgaaggacgcctggccgtcaaaggaaaattgattgatatttccggtcattcaaatgtatctcagccatcatagagaaacactttgtcaactgaatatacgtccgttgtgaaacatcccgagactggctcctgtcagtctttttttgcgcagcgattataaaaagttcatccttcttatctctcttgagggaaattataccagactgcactttttgaaagaaatgacaagagaaaaagatcgcgaaaattctcaaaaatgagaaatgaagatttaaaaaatggtatgattttaggaggaaaggacggctggtgctgtgttggaagcgaagcggttttatgtctctctgcaaatgaaaatcgccggattaattacggctttattaatacttgtcatcggaacgctcacggttatatttgcctttcagcaattaaaggaagggcagaagcaggctgaacagctggcggtgcaaacggcaaaaaccatttcatatatgcctcccgtaaaagaggcgttccggcttgcggatcaagaggcttttacaaagttagacgtcattgaacaaatgaaagaacaggcaggcgcgcacgccgtctacatcactgatcaaaaagggcatgttgcatttcattcggcccgaagcagtattccgaaagaaaatcaaaatctgcaaaataaaaccgtcatgttcggcgggtctccggtttccgacggaatgaaggccgtccggggaagcgccccggttattttggaggaaaaaaatcataacgaagtcgtcggaacggtgacagtcgaatttctacaagatgagatagaaaaagatatgaaggcgcatttgcggcatttaggctattttgcatgtttggtgtttcttatcggcatcgggggagcggcggcgctcgcaaaaagcatccgtaaagatacactcggccttgaaccgcatgaaattgcagcgctgtacagggaacgcaatgcgatgctccttgcgatgaaagaagggattatcgccgtaaacaaagaaggcgcggtaaccatgatgaatttatctgcggctgatatgctgaatcttccggaaccgatgatcggaaggcatataaaagaaatcatgccgggcgcaaagctcatgccggtgttggcagggggagaattaccgccgaacgtggaggtgcgtgccggagataaagtatttatcttaaacgtgaaagaaatgaagcagaacggacaagtatacggagcggtgatcagcttccgcgaaaaaacggagctcaagaaactgattaacaagctgactgaaatgaaaaaatactcggaggatctccgggcgcaaacgcatgaattctcgaataagctttacgcgatactcggtctgttagagctgggagaatataatgaagccattgaactgataaaagaagagtacgccatccagaatgaacagcacgaaatcctctttcaaaacattcattcacagcgggttcaggccatactattaggaaaaatgggaaaggcgtctgagaagaaagtgaagctttcaatagatgaaaacagctttttagaatcgctgccggagcatgtgggttcatcccagctcattacgatcatcggaaatcttattgataacgctttcgaagccgtcgccgaaaaagagaaaaaagaggtatccttttttatgaccgatatcggcagggatatcgtcatcgaagtggcggattcaggagacggcgtgcctcaggaaaaaacagaaacgatatttgaaaagggctactcttcaaaggggacaaggagaggatacggcttagccaatctgaaagaagccgtcagtgagttgcagggagcgattgagatttcgcagcaaaagagcggcggtgccgtatttacggtgtttataccgaaagaaaggccaaagggggaatcggtgtgattaacatcgcgattgcagaggacgactttcgaatagcgcaaattcacgaaaaatttatcgaacatcttgatggattcaatgtcatcggcaaagcaatcaatgccaaagacaccatatcgctgcttgagaaacggcagcctgatctgctgctattggatatttatatgccggatgagctgggaacagatctgctcccgcttatccgcggccgttttccttccgttgatatcatcattattacggcttctgccgaaacaaggctgctgcaggaagcgctcagatcaggcgttgcccattatgtcataaaaccggtgtcggcacataaatttacagaagtgcttttgcagtaccgtgaaaaaagagaatggctgcactcacagccggagctgagccagtccgtgattgacatgtttttcggaagcggtcagaaagaacaaaaacagcacaatgatctgccgaccgggattaattcgattacgcttcaaaaaatcaaaaacgcgctcagaacggcccaaaaagggatgacggctgaagaactgggagaaaaaatgggtgcctccagaacaacggcgcggcgctacgccgagtttctcgtttctcgggaagaagcgctcgctgaattagagtacggcattatcggcaggccggaacggaaatattatttagcacatgagtaagggatgggagaaatgaagcggttgggagtgcttcttgtcatgctggcggcgctggtttcttttgacggacggcaggcggcgggcatccgttcagctgaagggccggttgaaatagtcgtcccggcagcgcctcaaggggctgggacgtaacggcaaaagctttgcaatcggtaatagagcggaagcaaatattaggccggcccgtaaagatcatctataaacccggaggaggcggagacagcggctggaaatatgtaaacgaacgaaaaacggatgtcatcagtatgaattcaagtctgctgttaagcaatgaaattttgggacaaagccggctgaaggcagctgattttacgcctttggccattatcgcaaaagagtggcagaccgtcgctcttccgaaggattcaaagataaaaagcggaaagcggctgctcggcgatattaaagcaaatccgggcggcataaaaatcggatttgcgcccggcctcggaaatgatgaccagctctcctttgcgagagcggcggaaatggccggaatttctccgtttgatatccgcttttttcaatacggaagcagcaatgaagtcattgaagctcttatcagtcacgagatagacgccgcctcaatgaccatttcagaagcgagagacgcctatcggaaagggaaaatcacattggcggccgttacgtctgacaaaaggctctccggcttcagcgatgtgccgacatggaaagagcagggggtgccgtttgtctttgcgcactggagaggcatcatggggccgaaagacatgaccgaaggcgagatcgcctattgggatcaggctttgaaacagattacttcatccgcggagtggaagcaaatgttgaaaaaacgggattgggagagcttttataaaaacagcagcggcgcaaaacgctttttagaagagcagaccgagttttataaagagatgatgagcagcgaaaaataagccttccgcatatttgcggaaggcttttgatttataaatgaacaaaatgaacgaaaaggttataaaaaattaaaaatctttaaaatccaaaatatttacttcaatatccaattctcataagatagcaaaaaggcggataaaggggatcgggcctttaaaatgtaagcgtattcatgatgagggggacatactgtgttagcaatcttaggctttcttatgatgcttgtttttatggtgctgattatgacaaaacggctttcagtgttaacggcgctcgtattaacgccgatcgtgtttgcgctgattgccgggttttcttttaaccgggtcggcgagatgatgatctccggtattgaacaggtggcgccgatcgcagtgatgattatgtttgcgattctttatttcggcattatgattgataccggtttatttgatccgatggtgtcgcgtattttaaagctggttaaaggcgacccgctcaaaattgtagtcggaacagccgttttgaccatgcttgtcgcactggacggagacggctcgacgacgtatatgattacgacaagcgcaatgctgcctttgtatatcatgctcggaatccgtccgattattttagcgggaatcgccggggtcggcatgggtatcatgaacacgattccatggggcggcgcggcgccgcgtgcggcgagtgcgctcggcgttgatccggcagagctgacggggccgatgctgcctgtcatcgcgagcggaatggtgtgtatgattgtggtcgcttatgtactcggaaggatggaaaggaaacggctcggggtgatcgaattaaagcagccgtcccatacaaatgaaacggctgcggctgcggaagatgaatggaagcggccgaaactgtggtggttcaatttactgttaacgctttctttagtgggatttttagtgtcaggaaaagtgaatttaaccgtgctgttcatcattgcgttttgtatcgcgctgattgtcaactatccgaaacttaatgatcaaagggagcgcatttcagcccattcgagcaatgtgcttgcgatcggttcgatgatttttgccgcaggcgtgtttaccggaattttaacggggacgaagatggttgatgaaatggccatttccctcgtatcgcttattccggaacagatgggaggttttattccggcgattgttgccttaacgagcggtatctttacgtttctgatgcctaatgacgcctatttttacggcgtgctgcccattttatctgagactgccgtggcgtacggtgtagataaggtggaaatcgcccgcgcttcgattatcggccagccgattcatatgttaagcccgctcgtgccgtcgacgcatttattagtcgggcttgccggggtcaccattgatgaacatcagaaatttgcgatgaaatgggcggttcttgccgttatcgtcatgacggcctttgcgctcatcatcggcgcaatcacgattttttaacataaaacacccggttcgtcgcacactaaaggcatcagaggaggtgccatgatgagtgatccgtttatgccgcttttttcagtgagaagcggcgccggttttaaagcggcggacggcgtttacggactgaccgtgcagattgcgaatgtttactttatcgaaaatccctcagctccgcgggaaatcattctggttgacgcgggaatgcctcaatcgtcggagatgattacaaatgaaatgaaacgccggttcaaagaggggtatgagctgaaggcggtcattttgacacacggtcattttgatcatgtcggtgcgattgaagaactgcttgagctttggaatgtgccggtttacattcatgaaaaggagcttccgtacgtcacggggaaagcggattatccgcctgccaggcccgatgcgaaaaaagggcttgtcgcaaagctgtcaccgctgtttccgcgccatacgatccgcattccgtccgttcaggcactgccttcagacggtaccgttccgtttcttgaagaatggaaatgggtgcatacgcccggtcacacacccggccatatttcattattccgggataaagaccgcgtgctgcttgccggtgatgccgtgatcactgttgaacaggaatcgcttgcggacgttgtcattcaaaagcaagagcttcacggtccgcccgcctattttacagcggatacgcagacggcggccgcatccgttcagaaattggcggaactggagccggaagcgcttttgacgggtcacggaattccgatgacgggaaaaaactaccgtgaggatttgcttacactggctgaaaaactgcattccgttttgtaaaacacctgcgaaaatcacaggtgttttttcttcgcagtttccagtatgatacaaaaaaaccattgtgttcacacctaaaaacgatacaatgggaaacagatgtaaattgaaggagagagttttttgaaacatacggaaatactttgggatgaggcgaaggattttattgatgtctgctatcacgaactcggaatggaatcgcaaatcaacgcgcgactgcacgcgataaaagatgagatagatcggacgggaagttacgtccatacggcggaagagcttgaacacggggcgaaaatggcgtggcgcaacagcaaccgctgtatcgggcgtctgttctggcaatcgctgaacgtcattgaccggcgcaatgtgaacacgaaagaagaggtgcgtgacgcattatttgaacatattgaaatcgccacgaacggcggaaaaattaaaccgacgattacgattttccctcctgagaagaacggggagaaacaagtggaaatctggaatcaccagctcatccgctatgcgggatatgagactgaaaaaggaagagtcggtgatccggcatcatatgagctgacggctgtctgcgaaaaactcggctggcgcgggaagcggaccgaatttgatattctgccgctgcttttccggatgaaaggggacgggcagccggtctggtatgacctgcctcagacgctcgtgaaagaagtgccgatcacccatccggatattgaagagtttgccgatttaaatctcaggtggtacggggttccgattatcgccgatatgaggcttgaaatcggcggactgtcgtacaacgcggcgccttttaacggatggtatatgggaactgaaatcggcgcaaggaaccttgctgacgaaaagcggtatgatatgctcaaaaaagccgcttcggtcatggggatttccgccagcctgaataccgacctgtggaaagatcaggtgctggtggaactgaataaggcagtgctctattcatacaaaaaacacggtgtcagcattgtcgatcaccatacggccgcgaatcaatttaaacgctttgaagaacaggaacaagacgcgggcagaaagctgacgggcgactggacctggctgattccgccgatctcgccggcttccacccacattttccataaatcatatgacaatacgattgtgaagccgaattatttttatcaggacaagccttatcagtaactgatggaaaaggtgcggtaccctttcagacggtgtgattcttcgatggttacgtttgtgacatttgagaaggggctgccttttctgaccgcttcggcaaattgttttaacgactcttcagggccttcggcaaggatttccacccggccgtcatcacggttttttacccagccggctatcttatgtctgtcggcttccatctggacgaagtagcgaaaacctacgccctgaacccggccgtctgcaatcatatgatactgaagcatggaaaaaccacctttttcttactatgataaaggaaaggtaggatatttcgcaaaggatgtgaacgagatgacgcaagactattctgtcttatctatcaatctcggaaagcccgcaattcatgaatttgccggcagacaaatcaattcaggcatcatcaagcggcccgcagattctcccgtcatgctgtataaaacccattttgacggggacgggcaggctgatctgaagcatcacggaggtcccgataaagcggtgtgcgtgtatcccgccgagcattattcatattgggaaacaacgctcgcgagaaaacttcccgccgccgcgttcggagagaatgtaacggtcaaaggactggccgaacaagacgtgtggatcggcgacatctttcagctgggtgaagccgtcgttcaagtaagccagccgcgccagccctgcgtcaaactcgcgctcaaatatggcatcaaagatatggtgctccgtgtacagcagacgggatttaccggcttttatttcagggtgcttgaagaaggatatgtcgatccgcgtcccgtcctcaagcgtctgtcgagaggcaaagaaagcatttccgtctggtatgcgaacgaagtgaaataccgtgattcagacaatctgtcagcgattgaagaaatactgcgggaagaagcgctgtcagaaagctggagggagtccttccttaaaaaaagggacaggctcactaatgtatagaaaaaaagccgtgctgcactgacagcacggctgatttacgttatgcttgtttctttgtttccagcagattggcaaggaagtactttttgaagctttgaagctttcttccttcatagtgggtaattccttttttctttaactcttctacataccagcctttactgccataatgcatgtcagaaaactcctttctccgttctcccgctggggaggtttcttcagtttttgccaaacttttggcattgtaacatctataaaaagacgctgaaaagggataatgcaaaaactgagcctttcgattcagagatgtaaagctttcttacatatatatgtaaagggcggtcttttcatgcttaatggccggttaattttaacagcaccgttccgagtgtcatgattccgaaaacgacgccgaaataaatcagcatccccttctttttcttcaccccgtaaacggtgagaatgatgctttcaataaagaaaataaacccgaagataataaaccacatgttgaaaaatggctcctttcacagacatatgtccagtgtagcacaactcttataacggagcataaaaaagccgggcactgtatcagtgtccggcaagtttgacgagaagctgggccaaatgctgtttttcattatcatccgcgatgtcccacagttcttgtaagagtttttcttccgcattgcggggctcctcgtgtttggcgagatagtccccgaggatggcggcgcttttgatgattttgctgtcatccagacccagtttttttccggcggaaattttctgatgaaggtacgccttaaattcctcgaaatcctctaaaatctgctgtttcgttacgccgtgcatggcgtgtatttcgttttcaattttgattttttctttatcttttttcatgcgtctccctccttcgggttagttgttgtatacctgttcgggagggagatgaaacattacaatgcagttaaaataatcggtttgtcttttgtaatcacgatggtgtgttccacttgggcgacaaggcttttatccggcgttttatatgtccagccgtctcccgcttcaacaatcgtttccgctttcgtggaaataaacggctcaagcgcgatcacggttccgtttttaaacagcgcgttatcaaacggatcgtagtaattcatgatgtggttcggcgcttcatggaggtttctgccgattccgtggcccgtcagcgttttaatgacggtaaatccgttggagcgggcttcatggtagacggctctgccgatctggttttgacgtttgccggcttttgcctgatccaatcctttctgaaatgcggatgccgcgcagttacaaagcttttgcagacgttcatcgccttctccgagcacaaatgaaatgcccgtatcggaataaaaaccgccgaactccgccgaaatatcgatattgacaagatctccggcttttaagattttagaggcgctcggaatgccgtgagcgacttcgtcatttacgctgatgcatgtcacgcccgggaaatcgtattccttctccggagcggaagcggctccgtgctcgtcaagcaccgcctttccgatcaggtcaagatctttcgtgctcatgccgggctcggcttttttcttcatttcttcacgcgccagcgcgacgattctgccgatttttttaaggccttctaattcttgatcgttcgttacaatcattgtcattcccgctttctatttttaatcatctgattcaagcttaccacaactggtttataaatagaaaaccaacaagccttatgtgaataaatgaaggaaaattggtatagatcactagataacttatgtggtatatttaagaaaaaagaagggggatgggtaaaatgcttcaatttttgcaaaaactcggaaagtcttttatgcttccgattgccgttctgcccgccgttggtattattttggccatcggcagagaggacttattaaatattccgttcatttacgcggcggggaccgcggtatttgatcatctgccgctgattttcgcgatcggaatcgcgatcgggatttcgaaagacagcaacggggccgccgctctgtcgggagccatttcttatatcatgctggacgcggctgtaaaatcaatcaattcgacaaataatatggccgttttcggagggattatcgcggggttaattgcgggatacacgtataatcgctttaaggatacgaagctgcccgaatatctcgggtttttcagcgggcgcaggctcgttccgattgtaacggcgctgattaccattattttggcgggtatcttcggatttgtgtggccgccgattcagtcggtgattacgtccttcggggaatggatgatcgggcttggcgggatcggcgcggggatttacgggatttttaatcggcttttgattccattcggtcttcatcatgtgttgaataatattttttggttccagtttggcgattttcacggaaaaacgggagatctggcccgcttctttgcgaaggatccgacggcggggacttatatgacgggattcttcccgattatgatgttcgggcttccggccgcttgtctggcaatgattgccgcggctaagccaagtaagcgcaaagcgacggccggaatgatgatcggtctcgcgctgacggcatttattaccggaattacagagccgattgaatttgcatttatgtttttatcaccgcttttgtacggggttcatgctatattaaccgggttctctttatttatcgtgaatgttctcggaatcaggtcaggtttttcattctcggcgggggcgatcgattatctcctcagctacggcattgccgaaaaaccgcttttgctgctcgttgtcgggctttgttatgcggtgatctattttgccgtcttttatatgctcatcaaaacgttaaacttgaaaacgccgggacgggaagatgatgaggaagaggaagaagtgcttagtgaagatacggccggttccgtcgaagaacatgccatgctcaaggggctcggcggcaggcaaaatctcgaaacgattgatcactgtgcgacccgcctcaggctgaccgtgcaggatacgtctctcattaatgaggcggcgcttaaaaaagcgggagcaaaaggggttatcaaaacggggaataaaacggcgcaggtcattatcgggccgaacgtcgaatttgtcgcggaagagctgagagaggccgtccgccttgacgatcagaagcagacttgaaaaatccggatcacctatgtgatccggattttttttgaacatatatcaagtttcacataatgtacaaaaaacaatgtttccttctatgttaagattcatgtagaacaagtatggagatgatgtaaggtgacatggattgcagttgtttcaattgttgtcataagcctgattaagattgtgctgacatgccttcctaccggagcggtggaatggatcctccgcaagtttgaaacccattcaaagctcagtgacgagtccgctgccgtttccctcgggggaaaacgtctggaaggcgaagacaaacgacgggtgattgatgattttaacgaagccgtgtttatcgaacggcattatatatacccagggatgaagagcgttatcttcatccgcaaaacggagccgatccgcttgtcattaagacgagaaaaggaaaaaaagatgtgacggtgtttgtatacagctacgaagatcatgtagatgtcgtcaagcagcagaaaaagaaagtaatcgcttattcagttctttccgacagcctgcaaaagcgcactatggccgccgccgggagctgaacataaaaaagccagatcatatcaatgatctggcttttgtttattctttttgatcgtctgctgaggaatcttcacgcttcgtataatcgaattgtgacggatccactttcttgaagcctttcggctgatagaaacgaagcagatcgccgttgatgatcttatcagacatttcaagctcagtcttgacgagagagtcttcttttttgtcgacttctgaatcatctaaaagtcttccggttttcgtatcgtaatacttgccggacactttcgtatagttcggcgagatgaagtctccgttacggaacggaatgacttctctgtgctctttcgataagatatcagaacctgacatgagataatctttcgtatcgacgccgagcagatgaagaacggtcggcgcgacatcgacttcaccggcaaatttatgattgcggccgcctttcacgccgggagcgtggataaagagcggcacccgctgaagctgggcattgtcgtattcagtgatctcatctttgccgagcactttcgccatcgctttattatggttttcggagatgccgtagtggtctccgtacatcacgataatcgacttatcgtacaggccgtcttttttcaggtcattaaagaactgttcaattgattcatccagatagttcgcggactggaagtaattattgacgactgaatcgccaaagtctcccgccgggaagtccgtgtcttctttatccattccgaacgggaagtggttggacagcgtaatgaacttcgtatagaacggctgcggcaggctctttaagagcggcatggattctttgaaatacggtttgtctttcatgccgtagtttttcgtattttcttcgctcatgtcataataagcggaatcgaaaaacttatcgatgccttccgatttgtacatttcgttacggttccagaaagtctgcgtatttccgtggaaagcggcagacgtgtactttttgccttttaagatcgcaggaacggactgcagcgtgttttgcgctttattgacgaaaaccgaaccttgcgaaagcgggtacagagagttctccatcataaattccgcatcagatgttttaccttgtcccgtttggtggaaaaagttatcaaagtagaatgtttgattatcgtgcgccagtttgtttaaaaacggcgtcacttccttgccgttaattttgtaatcaatgataaaggactgcagagactctaatgagacgtagatgacgttttttccttcggcttttccgaagtagacgttattcggcacgtcatagttggccttcatatagttttccacatccgttacatcgcttgaatcggcaagcgcgcgctggctgtttgatttcacattctgcacggcatcgtaaatcgtaaagttgtacgtgcccaagtatttcaccagatagtttcggtcaaatgagcgtgtcaaaagctcgggacggtcggattccgcgacggcgaggttgatcaggaacacaagcacggcggaagccaaaacgattctgaatgatttcttcgccggtttttcagccggttttttcatcttaagggccaaaataatcaaaatgacggtatccaggaagtagaaggcgtctgtccatctcattaacgagaacgcgctgtctccgagctggccgccgtttgtctttgcctgcatcatgaccgggatggtaatgaaatcattaaagaatctataatagacgatgtttgcaaaaagcaaaaaagacaataaaaaatgaatcacaataatggctgtctgctgtaatttcttcttgaaaagaagcccaaatccaagaaagaacaagctggagctcagcggattcacaaaaagcaatattttctggatcgtgttgtctatgccgaggttaaagtttaaaatataagcgacatatgttttcacccacaataacacgaccgctatcaagaagaaggcaagtcctctttcttttataaatgttttcattgttacactccttttttccgatcacggtttacacggaacgatagaaaaaacgaacgtaatcaatataccatgaaaccagcaaatagaaaaggtggaaaaggctcatcggaaaaagggcgaaaaacgctgtcgcagcggcggttgatctgttgaatgacagctttaaaaaacacaaatggcacaaactgggatgtgaatttccgtatgatcacacccgattctattgaagaaagaggtaaacagtgatggatattgcgcatatcgtggctgaagataaaatcaagcgcgccattaaggatggagagttcgccggcatcaatggaatgggaaagcccctgccgaaagacgatgccgcacatcttccggagtcgctcagaatgggctaccgcatattaaaaaacgccgggatcgccgaggatgagggcgcgctgaagaaagagctgatgacgctcgattatttgatcgccaagtgccgcaatgaacaggagcgggatcacctgcggaacaaacggacggaaaaacaagtcagactcgacaaactgacggaggagaaagccatgttctcaaaacccgcatcttctcattataaggagaaagtgtacagacggctgggccgcccgtaagccggctctttatatttttttctgaaaaggaatgtgctccataaggcgcgggtaggaaatgtggagcaggccgtttacgcactgcgcctgtaacaggtggggctcagccggttcaggaagctcaatcgtctcatcgatttccccgtaataccggttttggcagacgcccatgttcttcggaaaaaggggtgtgatgtttcctcttatatgcagccgtgttcttgacagcagcctcaatgtcaattcttcttcgtaaacgccgggcatttccacaatgacaaatgtgtgctgttcatcctgataaatatcataagtcagggtgtttttttgtaaggagaaaaaatcttcgggagatttccgtttcaggacattggtccaaaagtcgctgggcttgtgctcgttcgtaatctcaagccactttctcattttttcgatatccacttcggcagaacctccctatatttgatttgcgatcggcattgacgggttggcgatctgatcctgatcgctcacgtcagggtcaagatggcccgaattcaaacatccggcggccggcgaaaaatcccctaaagaaaagttcgcgccgacaaatttgctgttggcggtgtggctgttttgtacggtctgaccgatatcgacgtttccgttttgcgttgctccgtttacttttatattgacgacgttaatttggtaaggcattcataaaaacccctttaatctataatgggcggcaccggcgtaatatttgcggtatctgcggttccgatggctgtctggtcgttgacatcaggatcatttaacaagttctccatcatcgattctataggtgacgtatcgccgaatgaagagttcagtccttgtgatttgttatttgtggtgggactgttgtatgccgcttccccaatcgtaatagatccgttgccagaaatactgttaatcttcaaatagtacaggttgataacagtggatggcatctcttcacacctctttaacttagttgtacagtactgtatgctttttgtgctcctgttgtgaattccgcccggacatgttcccgaccaaacaagaagtcaaggcccggttccggcggggctttttttgtttcagggtctttcgcagtatatttgtgatgaaagcgctataaaaatagattgacgacatgtatatacatcattacaatagagtcataaacatgtatatacaagttttttgagacaaaatgaaaacggttacggaggggttggcatgggtgagtttaaccgggctgcgcggcagatcgctgaagctgtcggcggaatcgaaaatattgaggcggcgactcattgtgtgacgcgtttgcggtttgcattaatagatgaaaccaaggtaaaccaaaaaatgcttgatgcaatagacattgtcaaaggatcttttgcggtaaacgggcagtttcaagtcgtgatcgggcaggggacggtcaacaaagtatatgcggaattagtgaaggaaacggggatcggggaagcgtccaaggatgacgtgaagaaggcggcatcgcaaaaaatgaatcctttacagcgtgctatgaaaacgcttgcggacatctttattccgatcttgccggcgatcgtcacggccgggcttttaatgggtctgaacaatatcttaacggcggaaggcattttttacagcacgaaatcgattgttcaagtgtatccgcaatgggcggatcttgccaatatgattaatctgatcgcggggacggccttcgcttttctgccggctttaatcggctggtcggcagtgaagcggttcggaggaagcccgcttttgggcatcgtgctcgggctgatgctggtgcatcctgatctgttaaacgcatggggatacggggccgccgagcagagcggcgatattccggtgtggaacttgttcggccttgaggtgcagaaagtcgggtatcaaggtcaggtgctcccgattctgctggcgtcttatttacttgccaggcttgagctctttttgacgaaacggacgccggagggcattcagctgttggtcgtcgcgccggtgacgcttttggtcatcggttttctatcctttgttatcatcggtccgatcacctttgcgatcggtaacgcgctgacggcgggattgattgccgttttcggccaattctccgccatcggaggcctgctgtacggagggctgtattcggcgcttgtcatcacggggatgcatcatacgtttctcgcggtcgatcttcaattaatcggatcaaagctcggcggcacatttttatggccgatgctcgcattatcaaatatcgctcaaggatcggcggctctggccatgatgctcattacaaaagataaaaaacagcgggggctttcactgacggccggcatttccgcatatttgggcattaccgagccggcgattttcggcgtgaatctgcgttacaaatttccgtttgtgatcgccatgatcagctcggggattgcggggatgttcatctccgtcaaaggcgttctcgcaagctcggtcggagtcggcggcgtcccggggatcttctccattatgagccggtactggggtccgtttgcgatcggaatgctgatcgtgctgatactcccgtttgcgggaacatacgggtatgcgcggctgaaacggcaaaaatagaaaacctgcggggcgccttctaacaggctgtcccttttccctttccattcaaaacaatacaggcggtgaagaaaaatgaaaacagacagcacaccatggtggaaaaaggcagcggtatatcaaatttatccgaagagctttaatgatacgacgggaaacgggatcggtgatctgaacggtattatcgagaagcttgattatttgcagaagcttttgattgatgtcatttggcttacgccgatttacgattcgccgcagaatgacaacggttatgacattcgcgattactgcaccatttatgaagaatacggaacgatggaggattttgaacgccttctcgatgaagcgcacaaaagaggaataaaggtcgtcatggatcttgtcgtaaaccatacatcagtcgagcatcagtggttcaaagaagcggtttcgtcacccgacagtccgtatcgggatttttacatttggaaagacggcaaggaagacggccgggcgccgaacaactgggaatcaaaattcggcggttccgcttgggagctcgatccggcctcaggccagcactatctgcatttattcgatgtgtcgcaggccgatttgaactgggaaaatgaagagatgagaaaacaggtttacgacatgatgcatttttggttccgaaaagggatcgacggcttccggctggatgtgatcaacctcatttctaaagaccaatcgtttcctgatgccgaggatggtcgtgacgggcgcccttattatacggacgggccgcgcgtgcacgaatttcttcatgagatgaaccgggaagtgttttcgaaatatgacagcatgacggtcggtgaaatgtcctcgacaacggctgaccactgcatccggtacacaaaccctgaaaataaagaactcgatatgacctttaactttcatcatttaaaagtggattatccgaatggtgaaaaatgggcgctcgctccgtttgattttctgaagctgaaacggattttagcgttttggcagacggagatgcaaaacggcggaggctggaacgcattattctggtgcaaccatgaccagccgcgggccgtatccagatacggagacgatggcgtataccggacgaaatcagccaaaatgctggcggcggccattcatatgatgcagggcacgccttacatttatcaaggtgaggagatcggcatgggcaatccgaagttcgatgacatcggctcataccgcgatgtcgaatcactgaacatttacaaaaagatgaaggaagaaggcgtgtcagaaaaagacattatcgccattttaaaagagaaatcaagagacaatgcaagaacccccgttcaatggaacagcgggccgaacggcggcttcacgacgggaacgccttggattccggcggcggatgattatcgggacattaacgcggaagcggctttgcgggacccggattcaattttctaccattatcagaagctcatcaagctcagaaaggaatatgacatcgtgactgaaggaacgtttgagctgcttgctgaagatgatccggcggttctggcgtacgtcagacacggcaaggatgaaaaacttctgtgcatcaacaacttctacgggaaagaagcggactttacggttccgcttaaagacacggacggctggcggtttacggtgctgctgacgaatgatgaaccgagggaagggcggccggaacgattgacgctccgtccgtatgaatcgatcgtttatcatctgacaaaagcgtgatacactaatctgggtggtcatgaatgaaagtgaataaatatatcacaatctataaagatatggtgcggcagattgaaagcggccagcggaaggctgaagacgttcttccgtctgaaaatgatttatgcgatcaatacggcacatcacgagaaaccgtccgtaaagcgctcaatatgctggcgcaaaacggctacatccagaaaatcaaaggcaaaggctccgtcatattagacagagaaaaaatgcgctttcccgtctcaggcctgatcagcttcaaagagctttcggaaacgctcggaaaagagacgcgaacggaggttcaccgtctcgggctgatcctgcctccctcagaagccgcaaaagagcttggtacagtggcggatgaaaaggtgtgggaagtcgtcagatcaagacggattgacggagaacatattattttggacaaggattactttgtgaaaaaacatgtgcctctattaacgaaggcgatttgtgaagattcgatctatgagtatctcgaaggagagctcggcctgtccatcagctacgcgcaaaaggaaattgtcgtggagccggcgggggaggaagaccggaagtatttggatctcggcgggttcagccatatggcggtcgtgaaaaaccgcgtctttttggaggataccagcctctttcagtacacggaaagccggcacaggctcgataaattccgtttcgtcgactttgcgagaagagaaaaataaaaacggactgccgcggcagcccgtttttttgtcagtatcaaaatgaatactatccaacaaaaatgtgcgtactggtactttcaaaaataatggctacaatagtacataacgagataaaaaggagagatcatgaatgtcagataaaaaacagcagatcatcgaagcgtatcaattcagacacgctacaaaggaatttgatcctgagaaaaaaatttcagaaagcgattttgaattcattttagaaacgggaagattatccccaagctcactcggtttggagccttggaaatttgtcgtcgttcaaaatccggagcttcgtgaaaaactccgcgagttcacatggggggcgcaaaagcagctgccgaccgcaagccatttcgtacttctgcttgcccggacggcaaaggatatccgttttgacgccgactatgtcaaaaaccacttgcgggaagtcaaaaaaatgccggaagatatgtatgaaggctatatcagcaaaacggaagacttccagaaaaatgatttcaatctgcttgaatcagatcgcgcgctgtttgactgggcatccaaacagacttacatcgccctcggcaatatgatgacagccgctgcgcagatcggcatcgattcctgccctgttgaaggcttcaactacaaagagatccaccggattcttgaagaagaagggcttctggaaaacggaagtttcgacatctctgtcatggccgcattcggctaccgtgtcagagaaccgcgcccgaaaacaagatctgcctcaaaagacgttgtaaagtgggtataagataaaaaaagctgccgggcgtgtcccggcagcttttaatgtttatttggttttgctaaaaaacaggcggtgatccaggacgtaacgggaatgatgatgccgatcccgattccggcgcaaagaatggtgacggcttccgcactgaatacttttgagttcactattttttcagctgagtatgataagtctttaaaccagataattaaagccaaatagctgccgaaaaaagcaaagaataacgtattcgtattcgttcctaaaatatctctcccgatgcttaatccgaatgtgtacagttcttttctgctcatggacggattatgactgtaaatttcccgcatgggtgaagtaatggaaatcgcgacatcagtaatcgccccaatcgtgcccatgatgatcatagctgcggtaaccttcacaaaatccaccccgacaaacagtgtgaatatgccgatatcccccaattcttcttcaccgaatccctgaatcgaagtatgttttgttacggacataataaaaaacagcagcaatgcaatggtcagcatcgcagaaataaaggcggttacggttttgacgtttcctccattaatataaaaaagagtaatgctgcaaatcacggcggaagagagcaatgttaaaacaatcggattgatatgcggatctgtcatgaaaataatggtgagaaagagaaccccgaaatttaagaataacgcaataaaagacctcgctcctttttttccgccgataatgaccattaatagaaataaaatcgccgcgagaattacgatgacattcatgagcttgccttcttttgtttaataaaaaagacagaagcatacagactggcgggtatggttaatacaattccgatccccccggccaatgctctggctatttccaaggaaatgttcatagaaagagtgaatcctatcggggaatcatttttcaaatacaaaagcatcatcggaatagagccgcttatataagcaaaaaacagaatattggtcatcgctcccatgatgtcttttccgatctccatcccggaacgtctgagagcttgtaatgagatacccttgttttcttcatataatccgaagacagatgacgtcatggtaatggctacatccatgaccgctcccagtgatccgataaataccccggccataaacaccgtgtgataagggcgggttaaatactgcatttcctcatatctgagacctttctctccggttgccagcatcaccagatacgtaatcagcagggaaacgaaagtgcctgcgagcgtcgcggctatggcggcatatgttttcgcgtgaaaaccgctgacaagcagcaatgagatgaccgtaaagatgagaatacagataccgcagataaaaattaaccctatattaggatgcttcctgtacaaatctaatgcaaacgacagtaaaacggcgttaaacatcaggctgacgatcgaaaagaagccttgtttttttccgacgataagcaaggtgaagatgaaaacccaagcgatcagcaaaagctgtttatcccgttttttatctataatgcttcccgatatatctttgtttgatggtttccctttatcaatagaaacgaatacttcatcgccaatcgaatatttctgatcattcgctccggataaagaatactgattggacaaatgaatgagctgccctttctgactgccgttttcaagtctggcagtgatcgtctgattgaaaatcttatctttgtttttatgcatgtcctgtacgtttgcctggtgttccaaagttgttttcgtcactctggcaatcggccgctcataaaaagaagcgttgtgagtgacaaaaatgatcgagctgataaaacaaagcgctgttatcacgtaaaacagctttttcttgtaagacatgcggtttcgtttgtttcctgtaatcttcaaaaaaagtcctccaaacaggcggcgccgtgtaaaagagaggctccgccgtgaagtgttaaacgatgcggatgcagtctttcgcgaataacgttcatattttatcactcggccgtacggctgtcgactcagagggggaccggcagaaaaagctctcctgatatcagatcaggagagctcttgggatgaaccgcccgataaaagcggtctttttatgcttcgttcactttttttgcttttcttctttggtacagatacagtgccgttccgagcgcgctgatgagtaacccggcaagaaggatggaatacatcgttgtggctgtatcaggaagcaggccgcccggcgatactccgtcctgcgcagggccggatgacggtttttgtccgcttggctgctttccggagccgtgatctccgcttgtcggcggcgcgctcttcgtgtttgcgtttaatatggtgtattcactgaaatgatttgtatagcccgtgacgagatcgtgtgaaaccgaaccgttgtctgtttttgtatagacgttctttttccggtctacatgataaatgccgggctgtttcgcctttttcatattctcaatgcgcagggtgagctttaccggcgctttgaatgttttgatgtctttgtttttctgcttcattgtaaagtcgtatacatttgaaagcgccccgctaacttttcctttcggcgccacgccgaatcgtgtatcagctgaagcggcgtttgccatcggcattttcatgctgaacttgtcatgcaggatcgtaagggaagaatccgatgttctgtcctttaacaggccgatttgttttttggtcacgctgagatcaatcggctttttggcgccgtcattcttatcgtaatacacgatcggcgtgttggcgtttttggcatagacggcaaatgcgctgtcatcttcaagcgtccacgaaccgtttttttgttttgtcggcaggtacacttcctgcgcgcggccgtcaactttcggttccaccgcttttcccgctttttcaagctgctcaacgaagacctcatagtcggcaaagccaaggtcttctttatgggatgcttcgttaaagacggaatatccgtctccgccttcaccgacaaagttactggtggcgactctgtatgtcttcttatcagaaatcggctttacactgccgtcatcctgtacggccgaagcttgaagaacacggtgtcccggctttttattcagtgtaaacgtgtatgttaaaccggcaacttgagggaaggcgccgccttgagcctcaattccgcttaatccttgttccagggcttgtttgatctgttttccggttaaatccgcgacgtaaagcgtgttgccgaacggcattacattcagcacgtcgccgagtgtgatgtctcctttatcaatgcccgcgcggatgccgcccccgtttgtgatcgcgatttgggcgccggccgcttccttcgctttttgcagcatgccgtccgcgatgaagtttccgagattggtttctttggagcggacatgctcgcgccggccgtcaagtgcgaccttcgttgaaccgactttttcatttttaactgagacgagctcttttttaaacggatcaagctcttttttcagatccgggtcttctttcgtctgctcattcaccggcagcgcttgaagagaggattgttccggcaggacgacgccgtttttgtcaaatgcgacatcgacacggcctaaatattcgccgtattcttttgcctgggcgacgatggtcggctcttcgtttttgacaatttccattttatctacaagcgtatgcgtatgtccgccgacgattaagtcgatgccttttacttttttggcgagatcgagatcacgctgatgtccgatatgggtcagggcgataattttattgacatgttccttgttctgtatttcttttaccgtatcttgtgcggattggaaggcatcatgaaagacaatgctttttcccgggcttgatgtgacggacgtatcttctgtcgtcaagccgaatacggcgactttttctccgtttacatcaagcagaatatatggatagatgcctgcttttttctttttccctgccgtaaatgtgtctgcttttttcatgaatggtctgagttttgactctttggacacatcgacatttgagctgacgagcggaaagtcaggtgcttgaaaattgtatttcccggacgggtcagacgcgctcccgttaccgctcaagaagctggcgagagcacccggacctttatcaaactcatgatttccgaaggtcattgcgtcgtagcccatgctgttcatcaattttaaatcagccagcccctgccactttgtgaaatagagatcgcctgagaaaacgtctcccgcatccagcaaaatgctgcggtcggtttcgcttctgatttctttgattttcgtcatccgcctcgccgcgttatcaaggtgggcgtgcgtgtcatttgtatgcataacggtgagtttccatgcgtcatctttcggcggatctgtgcccggttcatcatctttgaattggagcttgtactgtccgtagcccgcgttttgtgattcaccgatataggcgacgtcatctgcgcggtcggcaaacggctttgcggccaaggaagattcaaatgtcagatttgtccctttgaccggaaggatggaccagttatgatcagcctgcggattaatcgttttctgctggatgatgtaatccattaagacctgcctgttctcatcggcagaagagtatacgattttgtcattgcttaagtgagggaatcctccgccgcctgaagcgcggtaattatttgtgacgatcagaaattcctgcttggcgctgacgggctttccttgataagaaaggttgacgatccggcttgcatcgggatgaatgactgttccgttttcgttgtatttcgccggttttgtgacatcgacctgataggtgacaccgtcaatgacatcaaaattgtatgagcggtaggcgtcatttaaaagcgcttggctgccgccttttgcctgatcgatctgattaaattgccccgcggacatttcgagccagtctttcacttcgcttccgttcagcttgacgatctgaaccgtgttgtcatacaggtacaaatcgccgatgtttttgatggcgaggtcgccagcggaaatgtttgtatagtagtttgagccgttccgcccgccggctttaaacggggcgcccgccgagaggataggcagatctttgtactccgtatccttcatcttattttcggcgtaccatttttgcgcatccgttacgatttgaatggacggatcatctttgacttgggcgaagaaactgttgatatcggcttttgtctggccgacgggttctctgatgtatttcaaagtgccttcgtgcgcttttttgacggtattgacgacggtttcgttttccgaattcacattgccggcaatcggctcgatgctgccttttgcatcttccacatgccacgcgctgtctgttttttcaagccggaggtcgatgacgcccgcatatttgccccagctgcttgacataacaacggggatgccgttaatcgtgcctttatcgacgtcgaattgagcagcgcctttgtattcggcatcagggaaaagcccgtgctgatggcccgatacgatcgcgtcaattccgccgactttcgttgccaggtcaaaaacggcgttttccgctccggaagactgcgcttttttttcgatgccgctgtgggcgagggcgatgacgatatcggctccttcagctttcattttcggaacggttttctttgcggattccacaatgtcctcgacctgaacgcggccttcgagatttttcttatcccacgtcatgatctggggaggaacaaagccgatatagccgacttttagctgatgcttgccgccgttttcatccgtgacggttttgtcttttatgacataaggcgtataacggttttcgccgcttactgttttcacattggcgttaacgatcggataatcagcgcctttgattgtcccgtccaggaattcaagcccgtaattaaattcatgattgccgagtgttcctgcgtcataatgcagactgttcatcacttcaatgatcggatgggtttttgcgcctgaaatgatatcatttttctcatattttacggcgtattctccgaggggattcccctgaatcaggtctccgttatcgacaagcaccgtattcgggttttcgcgcctgtgcttctcaataagctgagccgttcgggccagcccgaattccgttgtcggtttgtcgctgtagtaatcgtagtccatcatgttagcgtgaacgtcagttgtggctaaaatgctgagattcacactggaggatttgttttcttctgctttaatgggtgatgttgggaggatcagactaagtatcataactaggggcagcagaatacggagtgtcatattgacgctgcatcgtcttttctgtattctcacctgttctccacctttcaacaaattttgtcatgcagtaccattgtaagaatattttgtgaaagtttatatagatttcatgatgattcttgtgaaaagataaaaaatgaggataatgacctatgtaaaacaggcgggcggtaaacgcgttacctatgtttgatgttagtgtggctggggtacatggatttatgtagacttcatcaagcaggaggtagtaactatgggtaaaaaaattgcagttgtattaacggattactttgaggatgtcgagtatactgaacctgcgaaagcttttaaagatgcgggtcatgaattaaccgtaattgaacaggaaaaaggaaaaacagtcaaaggaaaacaaggggaagcggaagtgaaagtggacgcgtccatcgatgatgtgaatccgaaagactttgacgcattgctgatcccgggcggattctcacctgacatgctgcgtgcggatgaccgtttcgtccaatttgccaaagcgtttatggatgataaaaaaccggtgttcgctatctgccacggccctcagcttctcatcaacgcgaaagcattggacgggcgcaaagcgacaggatttacttcaatccgaatcgatatggaaaacgcgggcgcgaatgtggtggatgaagaagtcgtcgtctgccagaaccagctggtcacaagccgcacaccggatgacattccggcattcaaccgcgaatcattaaaactgcttgcgtaatataaaagcggagcgccgtatcaggcgttccgctttttttgtgaagattcccggatgaccagctcaggcgccagaataatgcgttgttttttgtgctgggaattggtgattttatgatgcagcaattgagccgcttcttttcccgactgccgcggaaaggaagaaacggttgtaagcggaggataagaaatttcagcttccggcacgttatcaaagccgacaatgtcaatatcttcgcccggaacgagcccggcttttctgatcccttgcatgacgccgaatgcgaccaaatcactgaagcagaaaatcgcggtcgggcgctcagaccggcggaggagctccgtcacggcgtcacagcctgcttcgcgggtcggcgcgctgtcaatgacatattcatttttcacttccagatccgcttcacggagtgcttttttaaaccctttcatacgcttcgtccatgttgatgagtgcttcacgccgcccagaaacgcaatctcctgatggcctttctcaatgaaatgacgcactgccttataggtgccttcctcataatcggctccgacaaaatcacagttggcatcggcaatctccctgacggcgagcacgaccggaatgtcaagctgctcaaggcgggaaagggtttcctcagccgtccctgaaaccggacacaaaatcaatccgccgaccctgtgctccagcatggtcgagatcagctgctcctgcttggcgacggaatcaaatgtcgtgcctaacagcaccgttaatccgacttcctcaagcgtattctgaacgccgatcagaaactctgagaaaaacgtattggaaatgtcagtgataatcaatcctaccgttgtggacgtctgtgatcgtaaattcgcggcgacccgatcatatacgtaccccagctcccgcatggattgcagcactttctcacgggtcgcttcggaaattcggggattattgcggacaattaatgaagcggtggatgttgagacgccggcatgttcggcgacctgctgcaatgtcacccggcgttttttttgctgtttcatacgtcgcattcctcacttggtttttattcgttacatccattataagcgttttggcgcatgagaagaaagagagaggagggggaaaaagataaagcgccggaagacggattgtccttcggcgcttctgtcacaataggttattcaaacatttgctctttaatatactgaaccggcatttcacggcctgtccaatattcaaacgccatggcgccctgccaaagcatcatgccgagaccgttaatggtcttgcagccggctgcttgagcttgttcaagcaatttcgacgtaacggggttgtaaacgacgtctgtcacaatcaaatccggacggagcatggatgtatcttcaataacactcaagccttcaagcggtttcatgccgacacctgttccgtttgtgaaaatatcgcttgaagcgatttcagcacgcagcgcatcttgatcttcgagcgggaagactttcgctttacaagaagatcccttcatttcttcattgatgatgcggacattttcttccgctttttcgaaaaacgcgtcattgcgggcgaaaatagagatttctccgaggccttccaatgcggattgaatcgctatcggagtggcggccccgccggaaccgaccagcgtcatttttttccctgtgatatcgatgccgtgttcttttaagttgcggacgtatcccataccgtcagtggagtgtccgatcagtctgccgttttcattaacgactgtatttaccgcgccggtaaatttcgctgaatccgcgagttcatcgagataagggagaatgttcatcttgttcggcatcgagacattgaagcctctgacgtttaaggcgcgcattcccgttaccacatcttccagctgttcattgccgacttcaaacgcgaggtaagcgtagttcaatcctaattttttaaacgccaggttgtgcatcgccggagataaagagtgtccgatcggtgtcgcgaataatccgataagctgagtttttccgttaatccgtcctaattctttcttcatgatgtattcctccgttagtccattcatttgtttttcctcccgctttgagggcaaaaaacgctgattacatatgtttatttaaaatgctgagtacgctgcgcaattcctcaacgggaatctgcccgggcgctgatgcttctttgcccgctccgaacgtgcacgctgagccgaagacttcgccggccagccggctgatcaggcctgttcccgccattgacatcgtgatgatcggccggtctgcgtattgtgttttcatcgtgtgagtggcatccaataagacgaaaacatcttcagtgctttgcggcatcaccgcgattttcggaatgtgcgcgccgtacgcctgcatgttccggagccgggaaatgatttcttcttttttcggtgtctgatgaaaatcatgattggacatgacgacatatacgccgttgtcttcagcggttttcacaattgatttgacttccgcttctcccgtaaacagctcaacgtctgcaaggtcaatatgttttgtttcgatggcggttttaagcaattcaatgtaaaagcggtcatcaataactttatttccgccttctttatgggttctgaatgtgaaaagcagcggtgttgctcctgcggctttccgcagcttttcaagcatgccttttacggcgtccaggctgtcaacatgctcgtatacatccgcccgccactcaatgatatccgggcgaagcctgttgacggcttcaatttcttcgagcagttctttctctccggccgccatcagcggcacaatgatcttcggaagcccttcaccgatgaccgtgtttctgattgtgatagattgcatgataaatcctctcccttaaaaaatagtcaggctttcatcacttgcttaaagcggattccgataaacaatgcgaggagggcgctgacggccgcaattccgatatcaagcagaaaaacaggcgtcaggccggcggctttggatatcgctcccgttacaagcggaatgacaataaaagataagcttgatgctatattaacaaaagatgtgattgtacctttatttttagggaataaaacagccataaccgtcatcgccaattgcagaatgcccgcagttgaaagtccgatgacaaaggagctgatgaccgatacggccggctgctgaatgaaaatcagagcaagcagcgcgattgccgcgatcacagggtacagcaccattaccgtaatcggctgaatcactctgtttaacagcacagccagcaataacacggacacaagcgccccgatgctgtaatagctcaacaatttgacggcctgcacctcaggcatgcccaaaacggattgcccgaacttaggaagccatacttgaacgagcataaacagcgccgttgatgaaaagcctaacagaatgatcgcaacgccttcgcgccatatcgacggctgtgatgtgaacgcgtcatcagacggagaggcttccgtccggccgccgtcttctttttgcttatgattcggaaacggaactttcaacagaaaaaagccgttcaggaagaaaataatgcccggtacgaaaaacgtccagccgtaaaacaaatgcctgtccgcaataaacgcgataaaaaacggaagcaccgtcgcgccgattgatacaaacgctttgattaacacggttgcagagcttgcgtttttcggaaatccttcaataagcgccggatatgtcccggaatccaaaaaggaattggcgatcccggcgaaaatggcgaagataaacgcggccgtatagtttgtcgaaagcggaatcccgattaggaaaatcagatacagaaaggcgcccgacacgataaacggccgtctcccgaatgtatccgaaagcttcccggcaaacagaagcgaaatcagcttcccgatcccgatggcggagaccaaatagctgacaccggctgcggaagtatgaagctgttttgataatgcctccatattggatgcgataataatattgatcatgcccagcaggaaatagttaatataaagacccgctgccattttggtgtatatgtttttcatgatgacatcccctaatgcggttaataaagaattaaattatttttttaattgataaaagcacagcaccatacccctttattgaaccactgcctttctttgaaaactgtttgatacaacggttgcatagacaaacttgaataacgctgatatcacaatgagtatatcgttctactaaacaaaaaaagataagcggcccgctcatttagtatatcgttctaccaagttcacagttactatactccttctttttatatgtgtcaaaccgatgaacttttattttttacttttttaaatcaaaaaagacccgccgtttttcggcaggtctgacatgggtttatttcctgagagaggcgagctcctcggcaatggcctgcatttcactcgggctgaatgatgcttttttcatgaccatttgatgaaggtatgtaagatcttctattttttcatcactgaaatcttccgctctgatgacgccgacattgagcatgttgagcttttgcgaaatgtcttcaatcattttatttaacgtttctgtttgttggctcggcaaattcatgcatcctttcatgatcgttttcgtcccctttattctaacagaattcatttagaataaaagcttatttccacagccgcagaaaaattgctaagatgttgataaggtttttgatcctcaaaatgcggggaaagaatagggaggttatcgatatgatacatgtgctgtttgtctgtctgggaaatatttgccggtcgcctatggcagaggcggtattttctgatatggtgaagaaaaacgggctgaacgggcagattaacattgattcagcgggaatcggcgcctggcatgcgggaaatccgccgcatgaagggacaaaggagatcctgaaggagaaagggatcagcgcaagcggcatcacggcgaggcaggtcgggtgagtctgatctgaccgattttgattacgtcattgcgatggatgcagaaaatatcggacatctgcgcagcatggccggttataaaaaagcggcgccgcgtattgcaaggctgcttgattatgtaccggagtcagaccttgccgacgtgcccgatccgtattataccggaaatttcagcgaggtgtacgctttggtcgagtccgggtgccgtcatttgctggagacaataaagaaagaccatcatttataaggggattgaccgatgaagcagacacgcatcatggcaaaagccattctgatcggcgctgccgccggcggagcactgtccttattacataagccgacgagagaggcatgtttccggaacatggacgcgtgcaggcggcgtgcggcattttaccgaaaacatcctgaagccctgaagcagcaggcttccgcaaaaatggatcaagtgaaaatcttcgccaataccgtatcggaagatctgagttttttaaacgggcagatcaccaagctgaagcagacgacaccgcaggtcattgacctgttaaaagaaacgaaggagcatttttcgaaaaacgatcattgaggtgggatgtcatgagttttataaaggagctgtttgcaaggttttctctgcatgaaggacaaagtaaatcggcggagctggcgtattttttcctgctgtcattgtttccgttaatgattttcatgctgacgctcaccgcctatcttcccatatcggcagaagacgtgctcggggcggtcgatcaatacgcgcccgacagcgccatgtccatggtgaaatccataacggagcaaacgctgaacaagcgcagcggcgggcttttgtcattcgggattatcgccgtcatctggtcggcttcgaatggtatgaacgcgattgtcagagcatttaaccatgcctacgaagtcgaggaaaaccgctcatttatcatcattcgcctgacctcaatttttttaaccattgcgatggtggttacgattttaatcgcactgcttctgccggtgttcggcagagaaatcggaatgctggccgcggatttcatcggcgcctcggacctgtttttgcaggtgtggtcggttgtccgctggggtatcagtccgcttatccttttaatcgtgtttaccgcgctttacatattcgcgccgaataaaaagctttccctccgttttgtcctgccgggagctgtattcgcggcagccggctggattatcgtcagtatgctgttctcattttacgtcggcacctttgccaactacagcgccacatacgggagcatcgggggaattatcgtcctgatgatctggttttaccttacgggaaccttgttgattttaggaggagaaatcaacgcgcttttacataaacgtaaaaagcttcctgatgaaaatccgtaccgcgggagcaagctatagaggaacggatgacgttcaagctgaaaaacggagggaatcggctatgaccaagcatacgaaaaaaggcggaagccataataaacaaaactcaaaaaacggcccgaagaataaaacaagcggaagcgccaacgggcagaacggataccactagaaagaagccgcctggctcagatcaggcggcttttttatgtggccggaaaagaatgggattcggaagcggggctgtgctttgttttcccgaagacgagcgcaagccaaatacagaccagaatcaccgtaataaagtaaaacaagttggcgctttcaaaccgctgcatataccagccgcccgccaccgggccgatcatgcttccgaggctgaaggaaatgccgcagagcaggttgcccgccggcagcagatgggacggcagcaggtcgctcatatagctgatgccgagggaaaacatactgccgaccgccatccccgccgtgaaaaagcagcagccgatgacagaaggcgacggaaacagtccggccgtcaaaaagcaaagggcacccgttaataagatgacgagcaggacacgttttctcccgaatcgatcgcttaataaaccgagagggaactggaatacaatacttccgatggcaaaagcgggcaatatcagcgcgacggcatccacggatatgcctaaacgaagggcgtacacgggaaagcttccgttcagcgccgtttctaaaaaaccgtacccgaaagccgggagaaaagcgacccagccgaaaagaagggcgcggtaaaaccgttttgcgctgttgtccccggatgtttcatccggaccttgcgccgggtactcgttacgtaaggcaaacacaaacagccaggcacaaagactgatacagccggatacgataaacggaagggacggacttgttttcacaagagggaccatgaacgggccgacagcgaatccaagcccgaaggacagtccgtacagcgaaatgtttcttcctctgtttcggggcgttgacttggaagtcacccacgtttgggttgaaaaatgcagcatatgatccccgattccgataagcagccgaagaaaaaaccataaccatatggattgaagccaaataaaactgaataagctgatgataacaagaaatccgcccatgaccatcagaggtttgaatccgagcttgcgcagcggggcctccataaacggcgacgccagaagcacgccgatataaaggccggttgcgtgaagtccgtttatggctgcggattctccgttcgtttcaaaaatgacggagatcaccggcagaagcatgccttgggaaaatccggagatggaaacaagcagaaccaaaataaagaagtacagtcgtgacatcgcgtatttctccttcttcagtatctttcttgatcgtacacggatttgccgcgtccggcaacctgaaaatgccaattcgggctgccgaggaagtgtaattgaaggagtttttgagaaggatataaaaagacttattcgaaaaaaggagccaggcagatatgaatcggatttttttctttacggctgcggcgggagtgccgctttcagtcatcggcggcctgatgcactggccgtcagcggttttgtttattatttattgcttgacgattattgcgcttgcaagttatatggggagagcgactgaatctcttgccattatcgcgggaccgcggatcggcggtctgctgaatgccacgttcggcaatgcggtagagctgattatatcgattttcgccttaaaagaagggctgacgggcatcgtgcttgcttcactgaccggttcggtgctcggcaatcttttgctcgtcgcgggattgtcattttttatcggcggtttgaaatacaagcggcaggaattcaatattcatgatgcccggcataattcaggcctgctgatttttgccattatcgtagcttttgtcattcccgaagtgttttccatagatatgggggaaaaaaacaagcttgatttgagtgtcggcatcagcatcatcatgatccttttgtacgtggcagctctttatttcaagctcgtcactcaccgcggtgtttatcagccgaatcagccggaggcaaaggaagaagaggagcagccagagtggtcggggaaaagagcgacagccgtcttatttatttcaactattattgtcgcctacatatctgaaaaccttgtccatacgtttcatgcggtggctgaacagttcggctggagcgagctgtttatcggggtgattatcgtcgcaattgtcggaaatgccgcagagcatgcgtcggcgattattatggcgtacaaagacaagatggatgtcgccgttgaaatcgcggtaggttcgactttgcagatcgccatgtttgtagccccggttcttgtgatctgttctatcttttttccggtcaatatgccgcttgtattcacattgcccgagcttgtggcgatgatatcatccgtccttttgatgacgatgatttcaaatgacggcgattcgaactggtttgaaggggctacgctccttgccgcttatgtcatcatggcgatcggttttttcctgctttaacctgtaaaaaatgcggataacaacgattgcggaggaaaagactaaaggaaaatgctatagaaagagtgatatgatgagaaagctgtttcatgccacactgattctgctgttatcctttagttttttcgcaatgccgtctgccggtgcaaagaaaccgtttaaggttcccaactctgttgtaagcatttcaaaggaaaatacgtatccgaatgcttcacaggaccagccgatgcttcagccgagcaaactggcaaaggaattgttagatacatccgagatcaacatcgaaaatccgcatctgataaaaatgctgaatgaatcctcggtttccggttcaccgcttgccatcggctaccgggcgacaatatttctcgggaaatgggcgctcggctatcaatcgaacgaaacggtcgccaactgggaatataaaaaaatcaatacgaacagagcggataaccggggcggacagcaaaccgcggttatctcatacgcccaagaacagcagtacaaaattaaaggcgggctcacagcgaaggtgccgaacgcagaagacgtaaaaagcatgatgatgcaaaaagcgatgaagaaaacaaaactgccgctcgcgtttgaaacggttatcggcgcaggcacaaaacgcgatcaaacctacaaaatttctccgcagcggctcggctacctgcacgcctacgctccggccgttaatgaaaaaggaaaagtaacatacggtgaagtgtatttggtgctgaaaggcagcaagcggaaacttgtcgtcaaaaatgtgacttcgcaaggaatcggggcttggattccggtgcaggatcacgtcacattcggttttcaaatgacagcgcagccgagataaataaaaaaagctgattccggttcgggaatcagcttttttgtgtgtgatacatttcctcaagcaattgcacattgttgttgtacagctcccgggcaagaacgcgtctcaccgcaaggcttgccgagaagtattctttatcttgaaccatgcctttgacggtaaattctatgcctctcgtcaatttgttcaggctcatgattccatgcacttgaaacggctccgtcgcattgagaaattcatcccgcttcagtgaatcgcgaagctcatcattgagcatgtcgcaggctttttctaagacggcatatacccgctcgggatcttctttataactgatcacgacggactcggtaatccgcataaaatcaatattatagttttgaagctgtctgacctcaccgtttgaaatggtaagcagcttgccggtccactcacggatctggagggaacggagcccgatttcttcgactgtgccgttgaacagattgttaatcgtcacgtaatcgcctttatgaagctggcgttcgtatatcaaaaagacaccggccaatatgtccttgattaacgactgggcgccgaaaccgatgacgataccggcaacacccgccccggctaaaattcggccgaaatcatgaacgaataacgaaatgacgtaaaagataaaaccgatcgtcgccgtatactgggtgatggatcggacgaggctttcaatcgttttccctttccgttcctccaagaaatctatgcgtttaaataacacctggacaaagcggttgatcagaaaaacaccggcgtaaagcacgagagcgacgatgatgatctcaaccactttgcttttcaaaatatccgtaattgtcgtttccatcttctgttaacctctggcttttcgtaatgaaaaatccgtgtcctgataataactgtttttgacaaggacgttcggtccgaggcaccggacgtttgtgcagcggcagttcagctctttgctcagcttcgtctgtctccacttgtcatatgcatcgggaaggctgtctgttttaatattgccgagcggcggtgtatcgccgaaatccgtgacaatgatatttccgtcaaaaatgttgacattcaggcgggagcggccgtcagggtcgtttcgcaccgtaacgtttttcgcttcccgcaggcggcggaggagcttctggtcttcttcatcagggctgcatgcgtaaaacgggagcgtgccgaacagcatccatgtctcttcatcgcgaatgtcgagcagatgatgaatggcctgtctcatgtccttcaggctgagtgattcaagcgcgctggcgaaatcactcggatacatcggatggacttcgtgccgctggcatttcatttcttccgtaatctgccggtgaatatgttcaatatgcggcagcgtccgcttgttcagcatcgtttccgctgaaaccattacgcctgcttcgaccagcgtgcggctgttttcaatcattttatcaaaatagcgcgcccgctgttcaaatgtcggtttcttctccatcatcgcaaatccgatgtcggcaaagtcctcgaccgttccccaattgtgggaaatgtgaagaacgtccaaataaggaataatccgttcgtagcgcccgatatcaagcgtcaggtttgaattgatctgtgtgcgcacgccgcgttcatgcgcatatttcaaaagcgggacgacgtattcctttaccgatttcagcgaaagcatcggttcgccgcccgtaatgctgatagagcgcaacagaggaatttcatcaagccgctttaataaaaggtcgatcggcagcgcatccgggtctttcggctggagcgtgtacccgacggcgcagtgctcgcatctcatattgcacaaagtcgtcgttgtgaattcaacgttcgtcagtttcatatctccatactggtcgacatccatgtacgcttcccaaggatcgtactccggtgtaatcggacgcagtgctgtgttttgtgtcatgactatctaactcctttataaatgggcatactaacgtctgccaactgttaattttagacctgatctgccaagatcgcaagtagcggaaccattgaaaaacgccaaaaaatacgctaccattataaaaaatgaatggagtggaagtatggggaatgcagtaaacagcaaagatcagcagctcgattacctgaagaacagactcgatatgtttatgaatgtcattgattcattagaccctgaatcaacggacgttgaagatatagaccggctcatcggcatgcttgatgatctggaagcaaaatacgaacgctttaaaaaggattgggaataacccccggcggatgccggggtttttctttttccataatgcggctgtataaaagggcagggcctactgcaaaataaggaaaaatgcagaaggagtgctggtcatgaaatggttttgttcaatttgctgcatggccgttttacttgcaggaggcatcaacagcgcagaagcggtgccgaatgaacggataaactggggatttaaacgcagcgtcaatcatcagccgccggatgccggcagacagctggacaatctggtcaaaaaatatgatgccttttatttgggcaatacgaaagaaaagaccatctatttaacgtttgataacggatatgaaaatgggtacaccccgaaagtgcttgatgtgttaaaaaaacatcacgtcacgggcactttttttgtcacgggtcattttgtgaaagagcagcctgatttgattaaacggatgtcaaaggaaggccatatcatcggcaatcattcttttcatcatcctgatctgacgacaaaaacgggcgatcagattcaagacgaactcgattccgtcacggaagctgtgtacaacattaccggaaagcgggacaacctgtatctccgtccgccgcgcggcgtattcagcgaatatgtcctcaaagaaacgaagcgtctcggctaccaaacggttttctggtccgtcgcatttgtcgactggaaggttaacgagcaaaaaggaaaacaatacgcctatgatcacatgataaagcaggcgcatcccggcgcgatctaccttcttcacaccgtttcaaaggacaattcagaagctctggacgatgccattaccgatttgaaaaaagaaggctacacgtttaaaagcattgatgacctgatgtttgagaaagaaatgaagctgccgcgcctgtagaaaacacctctcctggtaatggagaggtgttttgttatttgatacatttaatcaatgccgcccaatccaaatctccgcagccttgtgcgatcccgctttcaaaatggctcttcgccagttcggcaagagggagttttgcggaaacctgttctgcggcggcgagcgccagattggtatccttgagccctaaagacattttgaagccggccggctcaaatttctcctcagccatgatcgtgccgtaattttgatagacgggagagccaaagagtgcgttggcgatttctagaaattgtttttgttctaaaccgaacttatccatcattaagaatgattcagataacgcctccagcatagaaacgagcaagaaattgatgctgattttcgcggcatttgccgtttttgtttcttcacccgtgtcaaatacttgctgactcaggatgttaaacagcggttcggcctttttcttcgcttctgccggtccggctgtgatgatgcgaagctcggccttctcggcggcatcggggcggccgaggacgggagcggcaataaaggactgccctctgcccgaatgtgcggcggaaagctgttctgacagcgccgtactgatcgtgctcattgaaatatgaatgccgttttcagataacccggcaataatgccgcaagctccgaacgtcacgcctgttacagcttcatcgtctgacagcattgaaagcacaatgtccgcatgttcagctgcctggcggggcgtttcggcatattcggcccctttatccagcaggtcagccgctttttctttcgtccggttatatacagtcaggctgtatccggctttcatgatattttcggcgatggggcggcccatattgccgagtccgacgatggcgatcttcatttgacagtccctccaatgaaaagttttccaccattatacatgcaaaatggttattctgctgtgtacaggattgccactttcagttccggttctgaagaccatccggagtctgaggcggctgtccccttataaaatccggtaaatcgggttttgatgattgtttttgaacggggttttacagtgaatgtttttgatttgaatgtgacgtcctttatgttttctgataaatccggcgtgacagaaatggtttgttccccttttccgtaatgattgatataaagcgtgcagctcatgcccgctctttttcgttcaatcagatgactgcattcgctgcggtgcttcaaatattcgacagactctttttcgggcgcgaactgttttaaggaaaaagcggcatattcggtggcaggactgataccggaagcggcccccatactgagaaagatcagaaacagccccgccgagggaagcgtccgcctgaacgcggcggcacaccagattaacgccgcaaagtaaaggacgaccccgggaatgacggagatatgggctccgtcttcagaccaggaagaaaagccgagcgactcaaagatgtaatcagacaccgtacggccgttatacagcggggcaatggacatgacactgaaaagcaggaggacagaagaaatgattttatgagaaaggatggtaacggcgcacacctctttacgtttttttccagactatcatgttttctcaaaaaaaagaacagccggcagccgttcttacttgaaaatattaaaccagcctttgcgggcgaaccaaaacagcatggcggcgacaagaacggccatgacgcccaaaacgataaaatacccgtatttccaatgaagctcaggcatgttatcgaaattcatgccgtaaacccccgcgatgaacgtcagcgggataaaaatggtcgagacgatggttaatgtcatcataatggcgttcatccggtttgaattcagcgtcacatagctgtcccgcaaatctgacgtcatatcacggtttgactcgatcagctcggccagttttaacagatggtcataaatatcgctgaaatacgccttcgtttcacggctttcttttacatggtcaaggctcaaaatccggtacattaaatcgcgcatcggaatgatcgtccgtctcaggttcaaaagatcagtccgcaattcaaacacttcattcattaaagtgccgtaagatttatgtgttctgctgtcttcaatttcattcagccggtcttcaattttgtacagcacggggaaatattcatcgacaagctgatccataatcatataagtgatgtgccccggcccttttttggctaatcccggagaagcgaaaaaccgttctctcacccttgagacgccgggcgattcgtgcaaatggaagctgacgatgaaacggtcggactgaaagatgtccacctcttccatttccagtgtgtccgggttcaaggcgtggagcacataaaaacggtagccgtcataatggtcgattttcggccgctgcatatgctgaaagcaatcctcgatcgcaagcggatgaaagtgaaaataatcccgcagcagctcggtttcatgcatctcagcgccgaaaaaatcgatccagtaccatgcgatgtccggttgttctgtacgtgataggggatattatctaatatctcattatgtgttgtgattgcggttatatgtatcataaacaaccctccgcctgccattatatcatgcggcgttatgaagaaaagtatacgaattgccgcccgcccgcttcatgatatacttggacaaaaaggggtggagcatatgtggaaggaaacggtttcggtcacgccgccgtatcattttgataaagtccttgagaggctgtcgctcgatccgctgaatgcggtcgatcttcatgcaagatcaatcaaagtgccgctcagaacacgggacggcaaactgtccgtcactacggttcaagcggaaggcaccgccgcagacccggtcttcctcgtcagcggagaaacggaccgcgaggagatgattgaacggatcaaacacatttttcaatgggaacagccgcttcagcctgtgcttgatcatttctcaaaaacaaatctgtcggcgctttttgaggagcatgcgggaaccccgctcgtcttggaatatgacgtctacaactgtctcatgaaatgcatcatccaccagcagctcaacctgtctttcgcatttaccttaacggaacggttcgtccatgccttcggtgaacaaaaagacggcgtctggtgctatcccgagccgaaaacgatcgcggcgcttgattatcaggacttgcgggagctccagttcagcatgagaaaagcggaatatgcgattgacatttcacgcatgattgcagacggagcgctcaatctggcggaacttacccatttatcggatgaagacattatgaaaaagctgatcaccatcagaggcatcggcccgtggaccgtccaaaacgtcctcatgttcggccttggccgcccgaatctgtttcctttggcggatatcggcctgcaaaatgccatcaaacgccgcttcgcccttgaggataaaccgtcgaaagacgtgatgcttcaggtaagcagcgaatgggcgccgtatttaagctatgcgtccttatatttgtggagaagtattgaatgaaaaaccgctttgatcattttttggaaacttccagtgaaaaacatgaaggaaccgccggctgcatgttatactgaaaagatgtgatatttcaaatcagccgctttcccaggagaaaggctttatatagaaacggagagaaaaaaacgtgaatcaacatcaaaaaaaggcgcctgccgaattgaaaatcgggcagacatttccgctgaccatcaaacgtctcggcattaacggagagggcgtcggctattttaagaaaaaagttgtcttcgttcccggcgctctgcccggggaagaagtcgttgccgaagcgacaaatgtgcagccgaaattttcagaagcacgcgtcaaaaacatccgcaagccgtctgaacaccgcgtcacgccgccatgcccggtctacgaccagtgcggcggctgtcagcttcagcatctggcatacacccagcagcttcgcgaaaaacgcgacatcgtcattcagtctctggaacgtcatacgagattcaatgtcgaagaaatgaacattaaagatacgatcggaatggacaacccttggaattaccggaacaaaagccagttccaagtcggacgctcgcaaagcggcagcatcattgccggcttatacggacttgattcccataaaatcgtcccgattaaggaatgcattgtccagcatccggcgacaaacaaaacaacgggtatcgtccgccgtattttggaaaaacacaacgtatccgtttataacgaacggaccaaaaaaggcgatgtccgcaccatcgtgacgagagtcggttttgaaacaggcgaagtgcaggtcgtgcttgtcaccgcgaaagagacactgccgaataaagacgagatcgtcaaagccattcagaaccggctgccggaagtgaaatcgattattcaaaacgtcaatggcgcgcgcacatccgtcattttcggtgacaaaacaaaagcgctggcaggaagacatgccattcaagaagtgctcggtgacgtgtcatttgaactgagcgcccgcgccttcttccagctcaaccctgagcagacggtcaagctatatgacgaagtgaaacaagcggctcagctgacaggaaaagaaaaagtcgtagacgcgtattgcggcgtcggtacgatcggcatgtgggtttcaagcggcgcaaaagagatccgcggcatggacgtcattaaagaatcaattgatgatgcgaagaaaaacgccaaaaaacacggcatcaaaaacgcggcatatgtcacgggaacagccgaacactggctcccgaaatggacgaaagaaggcttccgtcccgacgtggtcatcgtcgacccgccgcgaacgggctgtgacagaacatttttagataccatcaaaaaagtaaaaccgaaacgcttcgtctacgtatcctgcaatccttccacactggcgaaagacttgcaggcgctgtcgaaagactatcgcgtcgaatatattcagcctgttgatatgtttccgcagacggcccatgtggaagctgtggcgaagcttgtgttgaaatcgtctaactaaaataaacaattcgtaatcagacctggatttcggtataaacatttccgatttccggttttttttatgcgcagcctttgccctggctgtttatcttccttcttttctcggagatctttaatttaaactgatgaaaagagttgaaaaaacgtgtggaaaagcgaggagaaaacagccaattttgacctcgtttgtataatgacgctgtggtttattgtgacattaatgggataatgtaaaataatttgatatcattggtttgagatgaagttgtaacattattcaactgtaaagtatttatcatgccaaagtaagtaggtctttaataaatgataaaaaggaggtgaaaccgaacgagagatattgagatttcaacaactgaacgaaggttctgaagtagaagctgtaaaaggcaagggtgctaactttcactaaatcacagcggcagttggcatatcaacaactgtcgataaaagatcaaatacactaaaaaagcatgtttggtcgttatatataatatgaaagcctaaacaggaaaaggaccccaactattcctcttgttctaaaaaaaggaataaatataaggcggaaacgcaagtgataacaactattacagtaatacctgcgatggttatatccttaataagtaattattgcgacaatcatgcttcatcatataatgatgttagattgacactaggctaaaaagtattgcagaaaaggaaatggataaagaaatgggtaaagtatataaaagaagttggtttcacacgttgttggcatttttagtatcacagctttattttaactttgtagaattaacgggatggggtcctaattatagagaaatgaatggattcccagcaaatatagctgaactggatttctttcaaacatatctttcattctatgataatccatggtttaatattgtcactgttttcttgggggttttcactgttatacaaatcattaaaggtataacaaagaatatccgaaatgaaagcaataacttctgatgccttatttaatgatgaaagaacatgaacactttctaattaatcttatgaatgaagactgcggcacttagtcagcagtctattttattggttttggatcaggattaccgaagcgtaaccttatacaaatatatataggtgattgtataaagatattaacatacggggtttaaaagccgatcaacccttagtacatatactgtatagagccaagccacttgcggcgttgattatttctagaccatgagtaaatccgaaaagatccagattgaagttcttgaattctgttaagttcgagtttattttcccatgccatcctctttactccatgtgattcacaagcggcaagttaaggctttttctttttacattcttttcagtactcagatatacccccagccccatttgcttaatcaacttatttcttgaaatttgttttatggtaatagggagaactcatatgatattctatttaggttggaatcctttttatccaaaaagagcaaaagtaaggccgctaagaaagatgaaggtcagcgctaatcttaataaaccacaatataaataaaaattaggtgtagataatcatcacactttttctctctcaaacccttttaaaggtgaaggagttgactgagttgatcagaaataaacgatatggggttgactatagcggtagtctattacgttagctcaattaatgtgttctactccagtttgcttttttacttttaacgtgtaaaaagtgaaatgttcaaaatttactatcgtttgataagaagtgctgacacatgctataagtgtaaaagaagcatggtcagtttttaattttgggataaaggtttcactgtatcccatcatgaaaggatttggatttgttatgacagataatttctggcgtgaattaccgcggccattttttgtactggcaccaatggaagatgtgacggatgtcgtttttcgccatgttgtgagtgaagcaggcagacctgatgtgtttttcacagagtttacaaactcagaaagctattgtcacccggatgggaaggatagtgtgcgcggccgtttgactttcacggaggatgaacagccgatggttgcccacatatggggagataagcctgaaaactttcgccaaatgagtattggaatggcggaattagggtttaagggcctggatatcaatatgggctgtcctgtacctaatgtggcggggaatggaaagggaagcggcctgatttgccgtcctgaagttgcagccgaattaatacaggcggcgaaagcaggaggtctgccggtaagtgtgaagacgagacttggctacacggatgttgacgaatggcgcggctggctgacacacatactgaaacaagacattgcgaatctttccattcatctgcgtacaagagcggaaatgagtaaagtagatgcgcattgggagttgatcccggaaatcaagaaacttcgtgacgagattgcgccggatacccttttgacgatcaatggggatattcctgaccgtgaaaccggcttgaaacttgctgaacaatacggtgttgacgggattatgattggacgaggcatttttactaatccgttcgcctttgaaaaggagccgagagagcatagcagtaaggaattgcttgatcttttgagattgcatctggatcttcatgatgaatattcaaaagcagaagccagagcatataaaccgctcccccgctttttcaagatatatctccgcgggttccggggagcaagtgaattaagaaatcaatgcatgaatacaaagtcaacagatgaagtgcgtgcattgctcgatgactttgagagaaagtatcttgatgggatggagcaagagtgacataaacaactcatcatccggcccggatttcggtttgaattccgggcctttttgtgtgcagcttttacccagacagatccatggccggtttcgtcatgcagaaataaacgaataatggtacattgataggagatacatcataaaggggagagaaaaatgaaacgactgtgcatcatcccctgcggcaagaaaaaaatttgggatgtccattcagatacagggccggtaagggcggaagacgcttatctcagcccgtttcatcaggcatgcgagcgatatgcgaaagcatttttcgatgagtgggtgattttgtcggcgaagcacggatttcttcgtccggatgatactgttcccggaaattacgatgtcacttttggaaccggtcacccggagatcatggcagcggacgagctgcgccgtcaattttatgaaaaaggcttttccgacgtcgaagagcttgtcatgcttggcgggaaaaaataccgaagcattctaaacgccgtcatcggagagcatcagcatatcacctggcctctgtcatcgtataaaggcattggttacatgcttcaagcactgaatcgggctgttgaagaaaaggatgaactgcagcgcgtggatatgaaaaaaagagtgtaaccactcaaacgccgtgatagactgtatgcggaagaatgaagcaataaaagatttccgaggaaataaatacgtcgatcattgtcaaagacagggtgatgcccggtcttttttgtatgccataaaacgagacaaagggaacggatcgagacaaaatgagacacctgtctcaaactgtctccattgaaaaaataaaaacattcattttacgggcttcaaaggctggcatgcttcttgcatttataagtgtgaaccctaaatagaaggaggcgcacaaaatggaattgttaaaacgagaaggcttgtcattaactgaggaaaaagcgctgtggatgtaccaaaagatgctggaaatcaggggctttgaagacaaagtgcatgaacttttcgcgcaaggagtgcttcccggattcgtccatttgtatgccggtgaagaagcggtagctgcgggggtgtgcgctcatttagatgatggcgacagcattacaagcacacacaggggacatggccattgtatcgccaaaggctgtgatctggacggcatgatggcggaaatattcggaaaagcgaccggactgtgtaaaggcaaaggcggttctatgcacattgcggatcttgataaaggcatgttaggcgcaaatggaatcgtcgggggcggatttacgctcgcatgcggatcagcgctcacggctaaatataaacaaactaaaaatgtaagcgtttgctttttcggggacggagccaataaccaaggcaccttccatgaagggctgaacttagcggcagtatggaaccttcctgtcgtgttcatcgccgaaaacaacggctacggcgaagccacgacatttgagtacgcgtcagcctgtgattcaatcgccgatcgggcggctgcctacaacatgccggggtcacggtggacggaaaagatattttagcggtttatcaggcagccggggaagcgatagaaagagcaagaaacggcggaggcccgtctttgattgaatgtatgacttacagaaactacggccatttcgaaggcgatgcccaaacttataaaacaaaggatgaaaagactgagcatcttgaagaaaaggatgctatccaaggctttaaaaactatcttctaaaagaaacagatgcaaataaattgtcagacattgaacagcgagtcagcgaatcgattgaaaaagccgtctcgttcagcgaaaagagtccttatccgaaagagtctgagctgttgacagacgtctacgtgtcatatgaaaaagggggaatgtgagatggcgagagtcataagcatgtcggacgcgatcaatgaagcaatgaagcttgcgatgagaagagacgacaatgtgcttgtaatcggtgaggatgtcgccgggggagcggcggtcgatcatttgcaagatgatgaggcatggggcggggtactcggggtcacaaagggtctcgtacaggaattcgggcgcagccgagtgctggatacaccgatttctgaggcgggctatatgggtgcggccatggctgcggcatccacggggctgagaccgattgccgagctgatgtttaatgattttatcggaacgtgctttgaccaagtgattaaccaaggggcgaaattccgctatatgttcggcggtaaagcgcaagtgccgatcaccgtccgcaccacatacggagccgggttccgggcagccgctcagcattcgcaggcgctgtatggcctgttcaccagcatcccggggctgaagacggttgtgccgtccaatccgtatgacgccaaaggtttgctgctggcggcaatagaagacaatgatccggtattcttttttgaagacaaaacgtcctacagcatgaagggcgaggtgccggaagattattatacaattccgctcggaaaagcggatatcaaacgcgaaggcagcgacatcacgctgtttgcggtcggcaagcaggttaataccgcgcttgaagcggctgcacagctttctgagaaaggcatcgacgccgaggtgcttgacccccggagtctgtctcctctagatgaggaagcgattttcacatcgttagaaaaaacaaaccggctgatcatcattgacgaagccaatccgcgctgcagcatcgccacggatattgctgcgattgtcgccgataagggctttgatttgcttgatgcaccgattaagcggattacagcgccgcatacaccggtgccgttttcgccggtgcttgaagatcaatatttgccgacaccagaccaaattgtcagcgtcacgcttgaattgcttggcgagccggcaatgaattaaaggagggatacagaatggctgtaaaagtagtaatgccgaagctgggaatggcgatgaagaaaggtgaagtatccgtctggaataaaaaagtcggcgacccggtagaaaagggagaaagcatcgccagcatcaactcggaaaaaatagaaatggaaatagaagcgcctgaaagcggcacgcttcttcacattaaagtcaaagagggagaaggagtcccgccgggaacgcccatctgttatatcggggaaaacggcgaagaagtgcgggagaaggaggcgccggctcctgaaaaagcagggaaaccgcaagctgaacctgaacatattcccgctccaaaagccgggcaaaagcgcaaacaccgcgtgaaaatatctcccgttgccagaaaaatggcggagaaagccgggttgaaagtcgatacgctgaacgggacggggcccggaggcagaatcgtaaaagctgacgtcatcaaggcgatgaagacagaagctgaaccgcagtcttcggttcagacagcacagccggagggaaaaccggcttcagcgatgagaaaagtgattgcagaccgaatgcacaaaagcctgcaaaacagcgcccagctgacgctgacgatgaaagcggacattacggagcttgtaaaatggcagcagcagctcgccgacagcgcgaaaaagcggagcggtgttaaactgacggtcacacatttcatatcccgggccgcggtgcttgcgctgaaacagcatcctgagctgaacagctcttatcaagaggagcggatcatcacctatccatatgtccacctcgggatggcggtttctcttgaaaacggtctcgtcgtgccggtgatccgggatgcggaaaagctttcattccttgagcttgcggatcacatcagcacatcggcacgccgggcgcgggaaggcaatgcttccggagatgatctccacggttcgacattttctattacaaatctcgggggttacggaattgagcatttcaccccgattcttaatccgcctgaagccggtattctcggagtgggcgcaagctatgaaacgccggcgtttaaaggagatgagcttgtcaaaagcatcatgctgccgctgagtcttacctttgatcacagagtatgtgacggcgccccggctgcggacttcctgaaaacggtcaaagcgctgcttgaagagcctgccggtttgattttatagagagaggtgaaaaaatgaaactagccattatcggcggcgggccggccggatatgcagctgccgtgactgccgcgcggagaggagcagaagtcgttctgatcgacaaagggccgctcggaggcacttgtctcaatgaggggtgcatcccgacaaagtcgcttttggaaagtgcgaatgtgctcgataaaatcaggcatgcaaatacattcggcatcgaactgccgcaaaacattacactcaattggaaccgcatgcaggggcgcaaacggcaaatcgtcagccagctcgtgcagggaattcaatacttaatgaaagcaaatcagattaaagtcatcagcgggacagcctcatttctcacagagcagacattgcttgttgaagaagaaggaggcgcaaaagacattctggaagcggaccggatattgattgcatccggatctgaaccggcggagctgccgtttgccccatttgacggcgattgggtaatcgacagcaaagatgcgctttctttacagaaaatcccttcgtctctgctcattgtcgggggaggtgtgatcggctgcgaatttgcctctttattcagccggtttaaaacgaaagtgacggtgattgaatcggctgaccggctgctcccggcagaagacagggaaatcgccgccgttttcgaagactctttaagagacagcggggctgatattcagacaaaagccgcccttcagcggattgacaaagaaaggaaaaccgccgtgtggacaaaagacggaaaagaaattgaagctcaggctgatcacattttggttgcaatcggcagaaaaccgcgtttgcaagggctgaatttggatcaagccggcatccggtattctccgcgcgggattgaagtcaatgaccatatgcagaccaatgtgcctcatatatatgcgtgcggcgacgcggccggaggaatgcagctcgcgcatgccgccattcatgaaggaatcacagccgccgcgcatgcctcgggaaaggatagcaaagtcaatatgcgggcggtgccccgctgtatttatacatcgccggaaatggcagctgtcgggctgacggaaacacaggcgagagagacatacggagatgtgaaaatcggagaatgctcattttctgctaacggaaaagcgttaattaagcatcagcacggcggcaaaatgaaaatcattgccgagccggaattcggagaaatcgtcggggtgtcaatgatcggaccggacgtgacggaattgatcggtcaggcggtcatgatgatgaacggtgaaatgacggcggatatgtcggagcactttatcgcggcgcatccgactctgtcagaaacgcttcaggaagccctgctgaatgtcaccggacttgcggtgcattccgtataaccggaataccctttctcagatgagaaggggtatttttcgttgaaagcgctttacttttcccctacaatatatgaaaagatggtctgaacaggggggagcgaatacaatgaatgtcattcggaatgattttaaaacctggaagcgctttgtgaaagaaggcgtgctcgatgaatcccgtattcagaagcgggtggccgcctcatggcaccgctgcaaaaaagccgacgtcaacccttatctagaaaagggaccgaatgtaatgccggcagatcatttagaaaggcaggccgaaaagcatgcgttatttttagcggcctcaatgccgcacgcagaaagaatgaaaacagcgatgcgggaaatggaaatgatggttctcctgattgattcagacggcgttgtccattcagttgacggccacccgcgcaccattcatgaagcgaaccgcatcaatttcttaaaaggcgcccgctggacggaaacggccgtcggcacgaatgcgatcgggacggctctttatacaaatgaaccggtcatgatacacggctctgaacattattcgctcgcttctcatcaatggagctgttccgccgcgcccatccgttatgaagacgggcggctggcgggtgtcattgatatttcctgccccgccgcccgcgctcagccttttatgctcggaattgcctcctccatcgcttatacggcggaacgggagcttgccctaaagatcaaaatgacagaacttgacatgatcagcaaattcgccgggcttacccggtctcatgatccgatcgtgctttgcaatgaaatgagccgggttatcgccgcaagccgtcccgttcagcattttaccggacatatgctgcgcgagcttgaggaacagggctatcatatcaagcggacgaagcgggaggagaacggcttcacatgcgtttacttatccaaacgggaagaaaagccgtcgtttatatttcatggtgcggcaggcaaaagcccgtcatcccgacatatgcttgagcagctggagcttgtcgcccgaacggacgcaaccgtttgtcttacgggagaaaccgggacgggaaaggaggttgccgcccgggcgattcataacaacagctccaggaaaaacggcccgtttatcgctgtcaactgcggagcggtccccgaaaagctgattgaaagcgaactgttcggctactcggaaggcgccttcaccggggccaaacggaaaggacatagcggcgctttgcaaaaagccgataaaggcacgcttttcctcgatgaaatcggagaaatatcacactccatgcaggtggctctgttacgggtgctgcaggagcggaaagtcaccccggtcggcgggacaaaagagattcccgttgacatcagaatcatcactgccacccacactgatctgagacagcttgtcgaatgcaaaaagctgagagaagatttattttaccggcttcacgtctgtccgatccacctccctccattaagagaacgcaccgaagacattcccggactcttccttgaatttcagcgaaatcgcggctggcggggggagcttcctgttgactttttagacgtattaaagagccggaaatggccggggaacatcagggaattgtttaatgtatttgaacgtctttccgtcatgttcccggacggacggctgtcagggcgccccatcgcagccctgcttgaagcgtcaggtcttaaagaagcggccgagtcttatgaacaggaagaagcgtcctctgtctccatccgggagcacattcagaaaaacatcatcgtaaacgcgcttgaatcagcgaaggggaatgtcacgctggctgctaaaatggccggaatcccgcggagcacgttttacaaacgcctcaaaaaattcaaactcaccgccggacaattgtaagaaacaagcatacttctcttgggtgccggacacgttatgtgtgaggactaaaggaggtttgagacgtgaatacacagcgtgcgaaagacatttcggaatccgccgccatggcgtatgtgacgtatgaaggagtcccgatttatattcagcatgtcaacgaagacaaggaaacagccaggatttttccgatcggaaatccacaatttgagcaggaagtgctgctttctgatttacaagagcatttttgagaaggggtctgctgatgacagcaggcctttttcgtacctgtgggaactttcccgctttttgagaaaaataactaaaaatgatcaaatgatctaactccttcaaacccggtacagatcggaccttctcatgatataaataaaatgtaaacgttatcagaggagggcttcacatgacagacaaatcattctcaatcgttattgcaggcggcggcagcacatttacccccggaattgtattaatgcttttgaatcacctggaagagtttccgatcagaaagctgaaactttatgacaatgataaagaaaggcaggagcggattgcgggtgcgtgtgaggtattcataaaagaaaaagcgccggacattgaatttttggcgactgatgacccagagacggcttttacggatgttgacttcgtcatggcgcatatccgcgtcggaaaatatgcgatgcgcgcgctcgatgaacaaattccgctgaagtacggcgtggtcggccaggaaacatgcgggccgggcggaatcgcatacggcatgcgctctatcggcggtgttctggagattcttgattatatggaaacgtactcgcctgacgcatggatgctgaattactccaatccggcggcgattgtggccgaagctacacggcgcctcagaccgaattcaaaaatattgaacatctgcgacatgccggtcggaattgaggatcgcatggcgaacatcctcggattatcttcacgaaaagaaatgaacgtccgttactacggcttgaaccactttggctggtggacgtccatcacggatcgagaaggcaatgatttaatgccgaagctgaaagagcatgtccgtgaatacggctacgttccgaagacggaggccgaacagactgaagcaagctggaatgacaccttcaaaaaagcgcgcgacgtacaggcggctgatccggatacgcttccgaacacatatctgcaatattacttattcccggatgatatggtgaaaaaatcaaatccgaaccatacgagagccaacgaagtcatggaagggcgcgaagctttcattttcagccaatgcgatatgattacgcgcgaacaatcatcggagaacagtgaaattaaaattgatgatcatgcttcctatatcgtcgatcttgcccgggccatcgcttataacaccggggagagaatgctgttaatcgttgaaaataacggtgcgatcgcaaactttgatccgtcagccatggttgagattccttgtctcgtaggttcaaacggaccggaaccgctctcagtcgggaacataccgcaatttcaaaaaggcctgatggaacagcaggtgtctgtcgaaaaactgacggctgaagcgtgggaagagcggtcatttcaaaagctgtggcaggcgctgatcctgtcaaaaacagtgccgaatgcccgtgtggcaagactgattcttgaagatctgatggaggctaataaggactactggcctgagcttgatgtaagcccgtctcctatttcctgatgacaatcttccccgttttctttatctgttattctatataatagaaagaaaacggggggatttttgggatgagtcttgaagaactggttaatcagcattacgcgaaattaaatgacaacgatttttatattttaaaatatatattgaatcataaacatacgtgctaccatctcggtatcaatgacatggcgaaagcctgtaatgtctctcggtcttccatcctgcggctcgcccaaaaactgggcttcagcggctatagtgaattccgtgtttttctgaaatgggaggatcagcctgaagagggcgagaatatgacgtttgaaaagctgctggatgatattgaagccaatgtaaaatacgtgaagtcaaaagatatgacggagatgtgccggctgatagatgaagcaaaacggattttcgtttacggatcggggacggctcagagggtgtgcgcccgtgagctgcagcggatgtttgtatcccggcggaagtatctgattttaattcaggacatcacagagtttaatatcatgtgtgatgattttaaggttgatgacgtattcatcattatttctttatcaggcgaaacacccgaattaattccgcaggtaaggaccctgtccgcaaagggagttccgtttatttcaatcaccaatctgaaaaacaacgtactggcgcaaacgacgccgtataatctttatgcgaccagcaagccggtgacgttaagcgataaaacggaaatcgtcgcatttgccccgttttttctggtgggcgaagcgttattccgtgcatatgttgattataaagagctcgaaaattttgataaatagcgggaggtcacgtgaaatgatgcaaaaagtccagcgcttcggcagcgcgatgtttgtgcctgttttattatttgcattttccggtattattgtcggtctgagcacgctgtttaaaaataaaacgctgatggggccgctggctgatcctgacgggttttggtatcaatgctggtacgtcattgaacagggcggctggaccgtctttaatcaaatgccgctcctgtttgcgatcggcatccctgtcgccttagcgaaaaaagcgcaggcgcgggcttgtttggaagcgcttacagtttatctgacattcaattactttatcaatgcgattctgacggtttggggcggggcttttcatgtcgatatgactcaggaagccggcggaacgagcgggctgacgatgatcgccggcatcaaaacgcttgatacgaatattatcggcgccatctttatttcatctattgtcgtgtatttgcacaatcgttactttgataaaaaactgccggattttctggggatttttcaaggatcttcctacatcgttatcatttctttcttcattatgataccgatttcacttgcggtggcatacgtatggccgatggttcagtccggaatcggatcgctgcaaagttttctcgtttcttccggggcgatcggcgtgtggatttacacattcctggagcggattttaattccgaccggcctgcatcattttatttactcgccgtttatttacggtccggctgtggctgaaggcggtatcgtcacctattgggcccagcatctcggggaatactctcaaagcgtcaaaccgctgaaagaattgttcccgcagggggcttcgcgcttcacggcaactcgaaaatcttcggcattccgggaatcgcgctcgctttttacgccacggcttcaaaggaaaagaaaaaaatcgtcgccggccttttgatcccggtcaccttgacgtccattgtagcggggattacagagccgattgaatttacattcctttttatctcgccgtttttatttgcggttcatgctttgcttgccgcttccatggcaaccgtcatgtatatggcaggcgtcgtcggaaatatgggaggcggtttgatcgaagctgcgaccttgaactggatcccgctggcgtcaagccacggtttgacgtatgtataccagatcatcatcgggctgtgttttaccgctgtttactttttcgtcttccgtttcctcattctcaaattcaacatcgccacaccgggcagagaaaaagaggaagggcaggaaacaaagctctattcgaaaaaggagtacagagaacggaagcaggcttcaaaagaaacggctgcggcagacgaaacacagcgggatacagccgctttgtatattgaagcgttgggcggaaaggacaatattacggaggtcaccaattgcgccacccgtctccgcgtcactgtcgctgatgaatcaaaggtcaaaagtgacgccgatttcagagagctgggagcccacggcgtcgtcagaaaaggcagggcgcttcaggtcattgtcggattaggcgttccgcaaatgcgggagcgcattgaacagcaattggatcaataaggtcaaaaccttcccctccccgggaaggttttatctttttcgcagattattgaaaaaacggcacaccaaatttctttattcatttgccggaaaggcataaaataataatattgaacaaaggatttggaggcttacacatgtcaaaggctttatcatatgtaaaaccgtattcccttttggcgggaatcgctctgtttttcatgctcatcgagcttgcggtagagctgatacagcccctgctgatcgggaaaatcattgacgaaggaattttaaagcaggatctcggtacggtttggctgtggggcggggtgatgatcggactgaccgctgtttcattcgcatcgggaattttaaattcattctactccgcccacatcagccagagctatgcgtatgatacgcgaaaagggctttttcaaaaaattcaatccttctcttattcgacgtttgcgcaattctcatctacgtcgtttatcaccaggctgacaaacgatgtgacgcaggtccagaatatgcttttcatgagtctccggtttatgctcagggcgccgttaatgattgcggggggcattattctctcgctgaccgtcaatgcgaaactcggtttttttctgctgatcacggtgccggttttgcttttgtttttgctgtgggtgctgaaaagaggcggcgcgctgtttcggtccgtgcaaaagcggcttgatcaggtcaacacgatcatgcaggaaaacctgacggcgatcaaactgattaaagcgctcctccgtgcaaaccacgaagtgaaacgttttttgaaatcgaatacgaagctgatggaaaaaacggtttccgcttttcgtctcgtggaagcggcgatgccgattttaatgctgctgatgaacagctgcattttgtttatcttatggttcggcgccaaaagcattgctcagggcggagcgcaggtcggcgatgtcgtttccgtcattaactatgcgacgcggattacaggcgcgctgtccgtcctgccatttctcattatggtattttcccgggcgaaggcttccggggaaagaatcggcgaggtgctggaaacagaaggcggcgagggaacggggcacgacccggcgcgggcgcttgcaggcgggattgagtttcgcgaagtgtccttccgctatccggacatggaaaaagacgcgctgcatcacgtgtccttttcagccagcccgaaagaaacggttgccattatgggcgcgacaggttcagggaaatcaacgctttttcagctgattccgcgcctgtacacggctgattcaggcagtattttcatagacggcaaaccgatcggtgaattctccgcttgcgggctgcgcagggaaatcggctatgtgccgcaggaagtgcttctgttttcgggcacaatccgtgaaaatatcgcctggggacgggaggaagcttcactagatgaagtaatggaagcggccaaagacgcgcaaatccatgacacgattatgaagctgtcaaacgggtacgacacggtgctgggacagcggggcgtcaatttgtcaggcgggcagaagcagcggatttccatcgcgcgcgcttttatcagaaagccgtccctcctgctgttagatgacagtacgagcgcgctcgatcttcaaacggaagcgaagcttttacaagcgatcagatcctatgaatgcacgacactgattattacgcagaaaataaccaccgcgatgaaggctgacaccatcttattgcttgaagacggcgaattgctggcaaaaggcacgcacaaagagctgatggcacagtctcatctgtaccggcagatttatgaatcacaattcggaaaggagggagctgacagtggagaaagacattcgtaaacctttccgatatccgaaaataccgctcaaatcaaatgaaggcggcagaaaacgcgcgaaagcaaaagatacaaaaggcacgctgcgcagaatctggtcgtatgtagccgagaaaaaagggcttttaacccttgtgatcatcatggtagtcataagcgccatattcggcctgctcggaccgttcgtcatcgggaaagcaattgatcattttatcgtcggacggacgacggacggattggcgggtgtactgttcatactgtttgggatttacctcgtgcaatcattgtccttatggtttcaaaactattggatgatcaatatctcgcaaagcaccgtgtttaaaatgcggagcgagctgttcacccatctgcatgagctgccgataccgttttttgataaacagcgcctcggcgatttgatgagccgggttaccaatgatatcgaaaatgtcagctccactttaaatacatccgtcattcaagtgctgtcgagcgtcattacattcgtcggcacaatcgccgtcatgctgttcatgagcccgcttttaacattgatcacgcttttgattattccgatcatgcttttgagcattaaatggatcaccaaccggacgggactcctgtttaagcagcagcagaaaaacctcggcgagctgaacggttttattgaagagtcgatatcaggagcgaaggtcattaaagcctattcgagggaagaccgcgtcatggagcaatttttagaaaaaaacgcggcgttacaatcatcaggcttttgggcgcagacaatttcgggattcattccgaaagtcatgaactctttaaacaatttaagctttacgattatagcggcggtcggcgggctgtttgcgctgaaggggtggatttcgatcggttccattgtcgtattcgcagaatactcgcggcagttcacgcgccctttaaatgatttggcgaaccagttcaatacgatgttatcggccatcgccggggctgagcgggtgtttgacgtgctggatgaaaaagaggagcgggaagatgaagagcatgcgacgcaccagccgatcaaaacgggagagattgaattccgagatgtctccttcggctatcaggaagacagcccgatcttaaaacatctgtccttcagcgttccgaaaggacagtcaatcgccttcgtcggaccgaccggagcgggtaaaacaaccgttacgagcctgatcgcccgtttttacgagcccaataacggaaaaatcctcattgacggaacggacatcaaaaaactgacgaggtccagtctgagaaaaaacatggggtttgtcctgcaggattcctttctctttcagggcaccatcagggaaaatatccgttacggccgtctggatgcatctgatcaagaggtggaggcagccgcaaaagccgccaatgcccacggattcatcgaacggctcccgaaaggctacgataccgtccttacccaaaacggcgcgggcatcagccaaggacaaaaacagcttatttccatcgcgagagatgtgctggcggatccggtgctgctcattttggatgaagcgacgagcaacattgatacggtgacggaagtgaaaatacaagaagcgctcggccgtttaatggcgggcagaacaagcgtcatcatcgctcacaggctgaacacgattcaaaaagccgatcagattcttgtgctgaaagacggcgaaatggctgaaaaaggaacccatgccgaacttctcagccagaacgggttttaccgggaattatatgagagccagttccgggaatcataggtagggaaaaagacctccgacagagtgcggaggtcttttttttgcgaagacaaatagtacttttaagttattttcgttaaatgtaacaaaattacttgacgtaaataagttatgtatatatactagcttacataaagtaagtgataataattttcaaggaggattttatgaataaatcattcgaaacaggaacactgcttttaagggttgtaacaggtattatcttttttgttcacggtttatccaagtttcaagggttggaaggaactacgcaatttttccagagcatcgggcttccggcctttatggtctacgtcatcgcgacgattgagcttgtcggcggggtactgatctttttcggtttggcgacgcgcattatcggcgttctgtttgccgtcacattagtcggcgccatcttcacggcgaagctttcctcaccatttatgggcggatcggaatttgatttcatcttactggttgcgtcaattcacttagcgctttcaggaagccgtctgctttcattggatcagctccttttcaaatcaaaaaagggagaaactttttcagcataagaaagaaggcgttcaaatgaccggcattcatcaagatacagcaatcggttatgtcaaattgacgattaaaaatatggaacgctcgctcggcttttatcggaatgtcatcggccttcaagtcatctcgcagacagatcgttctgcagaactgtcagcagacggaaaacgcgtcctgctggtgcttgaagaaaatccgagcgccgtcgttctcccggagcggtctgtcaccggcctttaccatttcgcgatacttctgcctgaccggaaagaactcggcatcgcattggccaggctgattgaaaacggcatcgcgctcgggcagggggatcacgcagtcagtgaggctctttacttgtctgatccggacggcaacggcattgaaatatacgccgatcgtccccgcagcacgtggcgccgggatgcagagggcaattacgtcatgcaaacggcgcccgtcgatgtggacgggcttttggaagaagccggagctgaacggaaaagccgtctcccggaaggaaccgttatcggccacatccatcttcatgtgacggatttacaggaagccaaagcgttttacaccgatatcctcggttttgacattgtcggcaattacgcgggcatgtccgctctgtttgtttcggcgggagggtatcaccatcacatcggtctgaatatatgggccggaaaacatgcgccgccgaaaccgggaaatgcaagcgggctggattattacaccatcacgctgccgcatcaaaaagagctgtcacgtgtgacaaaagcgctgaccgatgccggctttgagatcgaagaaagagaagagggcgtattcgtcaaagaccctgtatcaggggcggatatcgcatttacactgtaagaaacaacccttgccgtctaaccggcaagggtttttatttttctaaaggctcgggaaagaagaacgtcgatttgcaatatacacccggcttttgtgtgactgaagagagcgaacatctcagtgaggcgcaaacatgacgcgtggagcccgccatcgccggcccgaactcagggcatccgctggattgaaaatgggtgtccgttcggcggatcagggagctgtatgggcagactttgaatagaaaaagggaagagccgcatccggtcacaagatgcggcttttcatatacaatttacaattgtgtgaaaaatgcccaaaataaattgtacttcctgattcttcctgatatgataagccgaaaaaggagaacctccacaaatgaattcaaatgcagcacagacggaacagtctatgaagcataacggaaaccggatgacgttcaaggactttatcattcttgccaaaccggggattatcatctcaaattcactcgccgcattaggcggattttggatcgcgtggcttcagtcggaaaggacggacggagggcccggtatatttgccgccatggcggctgccatgatcggcacggcgttagtcatggcgtcaagcactgtttttaataacttctttgaccgcggcatggacgcaaagatggagcgaacccgcacccgcgccagcgtcacgggaagaataccgccgacggtcatggtcctgtacggcacatgtctcggcgtatgcggattcatcatgcttgcttcgcttaatgtactgaccgccgttcttggcctgcttgcatttttgctgtatgccgtcgtttatacgctttggtttaaaagacaatccgtctggagcacatttgtcggcagctttccgggggcggctccgcctttaatcggttattgcgcgctggccgggtacattgatatgcccgcgattttgttatacgcgattatgtttttgtggcagccgccgcatttctgggcgatcggaatcaggcgaaaggaagagtatcgtgccgccggcattccgcttttgccgatcataaaaggcaatcgcgtcacaaaaataaaaatgctgcgctatatcgccgttttgactgcggtttcgctgctcgttcctctttatatagacgtcagcccgttttataccgcgtccgctctcctgctcggggccatctggctgtaccggagcgtcaaaggctttcaggcggcggatgacacgcaatggtcgaaggggatgtttttttattcgattgtttatttcagtctgctttttcttattttaatggctgattcgtttatcaatgcggtcctcagaacgtaaacaggcggcctgcagatacagagccgccccgttttgtttatgcttttttgatgagagccaaaatatcttcaagccaggaaatataattccgttcccgctcaagcgcttttgtcagcacgagataatggccgaaatcaggagaagaaaatgaatccgcctccgcggacgatgtcatcagttcttgataactgttttccagatcggacaatttctcctgccgctttacgagctgatcggtgaatagctcatccgcttcttcctgcgtcaaagctgagatgaaataagccttcagcataaattcatccttcaccgtttccggaatcgggtcttttttcgtcagccaggcagcaagctccagctctcccttgtcagtcagcgtgtacatttttttctcaagcttcgttccttgaatcgcagtgcgaaacgtaataaatccctcagccgtcagtttttttaattccggataaatctggctgtgctttgcgctccaaaactggccgagctcttccttaaaatagctcgatatatcatatccgctcaattcgccttttcgcaaaagccctaaaatcgcgtactttaaaattctcatgttgtcctccaagcccattcatttgacagctagtataccatacggccgctcaaaaacgcagaagcaccggatgcttatcattgaatccgcggcgccaaaatcagcaaaaatatgcagaaaggggttatcgaaacggcagcagaactggaaaaagcctttctcgtgtctttgcctcattcatatgacatcatgatataatcattgtaaaaattaataaatactgggagggacatatgaagacggtgattgtgtatgcaaacccggatgagaacagtttcaatgcggctctcgtaaaatacgtcgccatggctttaaaggacagcggccaaagctatacggtcattgacttatacgccgatcaatttgatcccgtgctgaagtacggcggcgaaaaaaagcgctctgacatgaaccgggacgctgaaacgaagaaataccggaaactgatgaaagaagcggatcatctcattttcatctacccgctgtggtggggaggcgttccggcgattatgaaaggcttttttgacagagtgcttgtcgccggagaagcctacacatatgaaaacggccgcgtaaaaggactgctccgggcagagacggcacaggtcttttatacggcggactccccgggctggtacttaaagtggttccggaaaaactcggactggattacgctgaaaaaaagcattctgcaattttgcggcattcaaaaagccgagcggaaccttttttctgtcgtcagaacgagcacacccgaactgcgggaaaaatggctgcgccaagcatacgccaaagtccggcgcgcttgtgaaaaaggagcggccgcatgcagataaaagaaattttcgtgattcgctgcctgtcctgtttaagtgtcgttctgcttcacgcagtttcaatggtgctgatgattcaggaagagtccttagccagtgccgcccatacggttgatgcgtttcggaccctcttgatgttcagcacgccggcgtttatctttatttcggaatttctgcttgccaggtcatacccgaaaggcgttccagcgggttttttaaagaaaaggggcaaagtcattttcgtgccgtttctgtttattgccgcggtggatgccattttaatgaaaagcgtggcggaagaaggagccggattcgtttcagtgatcggtaaatttttagaaaatgtgtttttaggaaacttcatcggctacttcattcttgtgatctttcaattttacattctccatatgctgctgcaccgctggctgaacaacacatcccccgtgtgggtgctgtctgtttcgtttatcatcaacgccgtctatctggcttacttttccatctttcatccgccggcatcatcggggcttgattctatttttccgttcttttgggttccgtttccgggctgggtgttttatttctgtctggcattttattgcggaaaggaatatccgcgttttttatcgctcatcaatcagtaccgttatgcggtttacttcagtgcggccgtatcggcaatattgattgtggccgtttcatatatcagcggcggctccatttcctctaagcgtccggatattatgatttacgcggtcagtatgatctttctgtgttttcatctgttttcaaagctcaaaaaagtgcccgcgattgtgatgatgatcagcaactattcgttttcaatctatctgctgcactcctactttttaatcagcggatatcttctggaaggctatttgcggtcaatgcctttagcggctgccatccttcttttatttttgatctgcacgctaggtcccattttcgtatcgtgggggtgcaaccatttcagatacggatacctgtttgtcgggaaagtgtatcagccgaagcagaccaaaagaaatacggcggcgcatcaaggccgcacagtctgaaaaaaaggcggcgcttcggccgcctttttgatacgggtccgctttatccggcacgaggacggatagttgtacatcctgcatacaaagccccgcctgcggctgttttgacggatgcatttatgacaaaataacgccaccgattttctcccttgtgaagaccgatatattgtatacttataggaaatactttcaaaaaaagtgaaaaagagaaaaactgtgagcttggatgaacgactaaaaaggagcggggacattatgaatgactgtgtcaaaacattcggagaacttccggccgaactttattcctttgcgggaggaaaaggaagcattctctctaaaatgtatcaaagcgggtatcctgtgcctgaagggtttgtgattttgccgtcagcctttcaggacggacagctccgccatcaggcgagagaggctgttgatcaatatgtgaattccatccgcagccgccatgcatctgcgttgtttgccgtacgctcatccgcgctgagcgaggattccgctcaggcttcctttgccggagaattcgatacggtgttgaatgtcagaacagatcaagacatgtccagggcgattgatgaagtccgccggtcggtacagtcagaaagagtaaaagcgtacagcgccgttcagggaatggaagatgagcatgaaatcgcaatcgtcatccagctgatgataccgtctgagatatccggagtgctgtttaccgcagatccgattacggggagcaggcgggagatgacaggcaattacgtctacggtctcggggagcagctcgtttccggggaagccgatgcctattcttttaaactggcacggcccaagaaaaaatatgacggccccggggaatttcgcaaatatgcgtcaaagctctataaactggcgaaaaagctggaaaaagatcttggagggccgcaggatattgaatgggccgccgcgggcgggacattgtatattcttcaatcccgcccgattacgaccttacaagccggaaatctggaaacctatgaatggaacgattctttcagcggtgattttttatggacaaacacaaatataggagaagcgattcccgatgtgatgacgccgctgacatggtcgctcctccggaatctggatgaagagtcgggcatcattccgggctattatgtctggtccggcaatatttgcggcagagcctataacaatatgagccagcctctttccgttctcgccgctttcggtctgaatccgaaaggcggaaaaattggaaaaatgatgagcgatacattgggagaaatcccggcggaaatgaagatacctttatatccgttctcaaagtatgaattattgaagatcatcccgaaaaaactgaaaccgtatctgtcgaaaatgaagcaagcgaaaaaaacatgtcctcctacttggacgaatcaccggagtggtgccggaatattgaggaaaagctgaaacgcgccgaaacggagcaggcattattagcgatatggaacgatgagatctatccgtatttatgcaacgcgtggtttgcgttaatatccggcgggcgtgattctgcgcaatcctcttcgtcgttaacctctcaattaacaaaactcgcaggcatagaagatgcgaatctcctgctttccaatctgaggggaaaaggcggactggccagcctggagccgattatcggcattgatcaagtcatgaaaggccgtatgagcgaggaagaatatctcaggaaccagggccaccgtggcccgcatgaatacgaactttccataccgcatccgggagaaaaccgggattggctgacgaagcagatcaaagaacacaaggagtcgggtattgatgccgaacaactgcttttgaaacagcagcgggcgcatgaacaggccttccgaagatttgaaaaaaagtttcctcataaggtcaaatggctcaaagccaaaatggaaaaagcgtcagaatacgcgaatattagagaaacaaccagatccgaatttgtcagagtgtaccggacagccagagcattcgcgctcagagcggcggaaatgaccggcatgaaggacgatattttcttcctgtatctgcatgaaataaccgatctgctcgcggggaaagagccggcggttgcgtcgattcaagcgagaaagcaaaactatgaaacctataaaaaactgccgccgtttccatccgttattaacggaagattcaatccgtttaaatgggctgaggatcctgacagaagagcggattattacgatgcttttatgcctgcggaaacggatgatgcgcatactttaaaaggtttcgcgggagcggccgggagagtggagggcattgtccgtgtccttgatgctccggaagacggtgattcttttgcggcgggggaaattttagtgacgtcgacaaccaatgtaggctggaccccgctttttccaagagcggctgccatcataacggacgtcggcgcccctttgtcccacgcggcgatcgtcgcccgggaactggggattcctgccgttgtcgggtgcggaaatgcaacgtcaaaactgaaaacgggggacagggtggccgttgacggcgggcaaggcatcgtccagctggaaccgcggcagactccggtcacttctgaagaggaaaatggtaaactgatagaatagaatcatgagaaaggagccgcgcatgaataaagcagttattaacggggagcaaatcagaagtatgagcgacctgcaccagacattgaaaaaggaacttgcccttcctgagtactacggtgaaaaccttgacgctttatgggactgtctgaccggatgggtggagtacccccttgttttagaatggagacagtttgaacaaagcaagcagcttacagaaaatggcgccgagagtgtgcttgaggtctttcgtgaagcgaaagcggaaggctgcgacatcaccatcatactttcataatacgagcagcgggagagagacaaaaatggaaaaacaaaccctcagccatccgattggagagtatcagccggctgaatcgatttcggccggacagaaacaagaatggatcaatgcgctggaacacgctccggctaaactgaaccaagctgtcagagcgatgtcggccagtcagcttgatacgccgtaccgcgaagggggatggactgtccgccaagtggttcaccatctggcggacagccacatgaacggctatacccggtttaaattgagcttaacggagaatgaaccggaaatccgtcctatgatgaaaaaggctgggccgctcttcatgattccaaaaccgccgcttgcggggatgcgcttgagctgttaacgatcctgcacagaagatgggccgctcttttgcgctccatgacggaagcccaattcaaacggacatacttccatcctgtatctaaagagacggttacgctggaacaggcgctcgggctatatgtctggcactctgaacatcacatcgcccatattactgagctttcccggcggatgggctggcatctgtcttagaggatgccggcttccggaaaaacgccaaaacagccgcagacacaatcgtgcataatgaaatgacggcggctgccgtataaagatggtggtagccgctggaaatgcccgcttcaatcgcatcagaaaccgcttttttgacggcgggaacggggattcggcttacctgctcctgcaacgaagaaagtccgccgccgatatcgggcgtttgcgcctgatcagcgggaatgccgcttttcgttaaacggtttttaatgtcctctccgatccggtcaaagcccgctgtaatgaagccggcatataaagccggagcgagcgtcagcccgacctgtcttacgagtgacagcgtgccgagcgctgttcctttgttttggcccgccgtttctgatacaagcacattcagcggagccccgagcagaaatccgaaaccgatccccgcaatgacactcgccgtgacaaattcccatttatccgtcacccataacggaaacaggctgaagcccgcaaaggcgatggcgcctgatacaaccgcggagaagaccggtccttttttatccgtgaccgccccgccgagccacgctccgatgcctgacgccaacgcaagcggcgtcatccaataacccgctttctccgccgatacgtgtaaatattgctccgcataagaaggaataaaaatgaccgcagcgagcagccctcccgataaaaatccgatgacaagcgtccattgaaacactttattttgcagcagcgagtaggcgagaatcggatcgcccccgcggtattcaacccgcttttcgaccttaagcagcaccagaaagagaagtgccgctcccaaaagatacccatacacctttacgtccattatgctttctgacagcttcgtcccatcgagattcgtgataccgatcatacaagataagatcgcaagagacagcagcattgtgccggcgagatcaagccgtttcgcctcaggctctttcgtttcagcgataaacaaaccgccgcacacaaccaaagcggcggcaatcggcaggttaatcaagaacagccaatgccacgatccggttacatcaagcaaaaagctcccgatattcggtccgaggacggccgccataccgttcatcgcccctaaaagcccgagagctttcccctgtttctccttcggaagcacggccagcacatgcgaactcccgattataaaaattccgccgccgccaagcgcctgaatgagccgtgccgccaaaaacatcgggaagctctgactgagtgcgacaagcaaagagccgagtccgaacaggccgacttccatcataaacagttttttccgcccgtatcggtccgacagcttgccgacaatcggcacactgacactgagtcccaatgtgtaaagggtcactccccatgatccccatgaaggagaaacatcaaaagagctgttaatcgtcgtcagagcagcggaaataattccgttgtccagcgccgccatgaacacaccgatcgtaaaaagagtgatggcccggctctggtttttttctgtttgcaatggatccggcatactgatcaatccttccttttttaattcacttcgaatatattattcacttcaagtgaattaaatgtcaaacaaaaaaaggccgccgataccggcaggcctttttcatctctatgcctgtttggaagaatcaagggctcttgccaagatggcaagtccttgattgaccgtttgtttttcttcagcggtcagcgtttccaatgaacgcttcaattttacatgtcctttttgataaaggctgcggaaaatatctttcgcgttttccgttaattgaacgacgactgaacggcggtcttcttctgacggagcgcgtgtaatgaaacatgatttttctaaacggtcaaggagccccgtcgtatttgaaagagaagcgcccattttctccgctatgtcactcaccttaagcgtcccgtggttgttcagaagcatcagcaccttcatttgcggcatgctcatatcaagcttcatccactccgacacatcgccgagtcccgccgaggtcatcactttcatgtacagcacccaaatatcccgttcctcaggagaaaaaatatcgccgcctaataccgttgtatcatgcagattataatccatcgtctcacttcctcattcatactcctgcataccatattactgattttaatcagagaaagaaagttgcagacgagttttgtttgaatgtgaggtggtagtgtataatatgttggagattattgggggaattataataaataagctattttatgatgattggagagaacattgctgactaaaaagaatgccttatcgatattaaaagtattatttcctattgcagttttgcttttagtcatttatcagtccaaaaaggaattgacagacctttcttttaaacgaacgctgtatattattaacgggattgagcgttacgatttatttattctcgttctgctcggtctccttgccgtcagcgcgatgtccttttatgactttgtgctgaaacggacgcttcgcctcgacattccgaattggaaagtattcagggtctcctttatcgccaattcctttaacaatgtccttggattcggcggtctggcgggcgtcgggctgcggacgatgctttacaaagagcatacgaatgacgtaaaacgccttgtcgcaggcatcgcctggcttacgtcctcagcgctgctcgggctgtccgtcttcagtatcctgaccattgcccgcattctgccggtcggagagattacaggtgagaaaccgtggctgtgggctgtaatcgccggagtggcgcttattgtgccggcagccttaatcgccgcttgggtcaacaataaaaaagctcgcgcagaagacggtgaagcaaaaccgaggcatccggttttttcttacatcggggcatcgtttgccgaatggtttgcggcggccgtcgtcatgtattattccctgtatgtcatggggattcacgcggatgtccgccatgtattcggtgtatttgccattgccgctatcgggggaatcatcagccttgtgccgggaggattcggttcgtttgaccttctgtttctgctcggtatgcagaatatgggctttccgcaggaggcggttgtgacatccatcgtcatctaccggattgtgtattcatttattccgtttgtgttcgggctgttctttgcggccggcgatttaacggaaaatacgcttaaacggctggaatcaaatccgaagatggcgcccgccgtggaaacgacgaacgtgcttctcgtattccagcgcgccatcttaatcagagtgctttacggttcgctgtcgcttttagttttcatggcgggagtcgttgtgctggcatccgtcgccctgccgattgacagggagacggtcatcccgcatattccgcgcccggcgctccttgcgtttaacgcgttatcgttaagcgcggctttgattcttttaatcttgccgattgaattatacaaacggacgaaacgttcttattcaatggcggttgccgcgctggtcggcggttttgtgttcagttttttaaaaggattgaacatcagcgcgatctttattctgcctgtcgtcatcgtattgctggtgctgttaaagcggcagtttatcagagagcaggcatcgtatacgctcggccagatgatttttgcggccgctctgtttattatcgccttgtttaactacaatctcattgccggctttatctgggataaaatgaatcggctgctgcgccacgattatttcgttcataacaattcgcacattacatatgccacgatgacggccattattgttgtgccgctgtttttcctgttgtttacggtcttttatcataaaagatcgaagccgatcggagaaaaggccgaccctgaacggctgaagtcctttttggcggaagaaggcggaaacgccctcagccatctcggctttctcggggataagcggttttatttctcaagcgacggcaaagcgcttttattgttcggccagatttccagaaggcttgtcgtgctcggtgatccgtcaggacagagagactcttttccgcttgtgattgaggaatttctgaatgaagcgcataagcaggggctgagtgtcatgttttatcagatcgaacgtgaagatctggcgctgtaccatgacttcggctataacttcttcaagctcggagaagaggcgttcgtggatatggaagcatttacgctgtcaggtaagaaaaaagcggggctgcgggcgattaacaacaaatttgaccgcgaaggctacacatttcatgtcggggaaccgccgttttcctccgagtttatcgccaagctgaaagacatatcggacgaatggctcggaccgaaaaaagagaaaggtttttctctcggtttcttcgaccgggattatctggaacaggcgccgattgcttacgtgaaagacgcggaaggggagatcatcgcttttgccaacctgatgccgatgtatcaggaaggcgagatatcagtcgacttgatgcgttatcggaaaagtgcgccgaacggtattatggacgcgctttttatccgtctgtttctctgggcgcaggaaaaaggctataccacctttaatatgggcatggcgcctttgtcaaacgtaggaacggcttttacatctttctggtcggaaagaatcgcggccgtcattttcaacaacgtccggtatatgtacagcttcagcgggctgcgggcctttaaagaaaaatacaaaccggagtggcgcgggaaatacttggcgtaccgtaaaaacagatcgctgtccgtcacgatgattctcgtcacccgcctgatcggaaaaaccaaaaaaagacgccgttaaaaggcgtctttttttttgaagaattaactaaaaattctaattttactctgttatactgaataacatgatcataaggtgaaaggaaggctgatgaatgaaacaggcaaccgtgtttaaatatgaagcgtttaccgatattcctgttttgggaaatcccgcgggaatcgtctttaacggagatgattattcagatgaagagatgcagatgatcgccgaaatggcagggtacaatgaaacctcatttctctgcaaaagcggagaagccgatctgcgcatccgctattttacacccggccacgaaatgaatttatgcggacatgctaccgtcgcctctctttacgcattaattgaaaagggaaggcttcaggctgatcagacatatcaaattgagacaaaagccggtattcttcccgcaaaagccgctgaacgaaacggccgggtatacatcacgctcgaacaggcacccccgcaatttctgccgtttacgggagacaaagaaaagcttgcggcctcgctcgggattacggctgaggattttcacagcgagctgccgattgtttacggatcaacggggatctggacactgattgttccgctgagatcacttcaagcatcacggaatatggtgccggacaacgcacaattccccgctgttttgcgcgatcttccgaaagcgagcgttcatccgttttctctggaaaccgttcatccggaaagtgatctgcacggacgccatttttcttcccctttctccggaacgaccgaagatcccgtcacgggaaccgcttcaggcgttatggcggcctatatgcggcaatacggaggctctgaagccgaatgcctcacgattgaacaaggccaggaaatcgggaaagacggaaaagtggaaatcaggattacagaagataacgaaaagatgaaaatcgagatgacgggaacggccgtgtatgccgaatcaatcaattttcagcttccgtaacggtttacaaaagacggtcgtatccgttatattataaatgataatcattttcaattgaataggaaggtgaatcggcatgccgaaaaccgaacaactacagcaaaacgaaagtcttgcacatacaatcagaaacagaagatccatccggtcgtttaagccggaaaccgtaccttctgaagtcatattagatatgcttgaaacggccgtttacgcgccgaaccacagactgacggagccatggcgttttatctacgcagcaagcgaagcgggtaaagaaaagcttgcggacagctacgtctcatttttcaaaaaaataaaagatgatttcaacgaggaaaaagagcggaacatgagaaaaaacctcagcgccgttccgggatttttgcttgtcgtcttaaaagaagatgaaaatgaatttacgagaaacgatgatttcgcggcgctgagcggcatgattcaaaaccttcagctgctcgcacatgaaaacggcatcggcatggtctggaaaagcggccgcatcatgtatgacaaacaggtgcaccaagacttcggtctggcagacaatgagcgcttcgccgccatcattcaaacgggctatccggatgaacagcctaaggcgaaagaacggacgccggcaaaaagcctgtttaccgagttgtaaaaaaatccccgtctctatacagaggcggggatttcgtattagcgggttttgcttttagctctgttgtcagcggctttcatccgcgcctgcgcttcgcggtcagcggaatcagcaagctcgcttgaatattcctcgtacgtgccgtctgtttcgcgtttcaaagcatccggaacttgaggaagtttttgtttgtttttatcacggtttttgtgagtatgatttctgcccatatcaatcgccccctgaaaaaagtgatatcaaacaaacatagtatctgcccggccccgatctttattcagtttatttccgtttggctgctctttccgcttttttaaattcaccggaataaaggacttcctgcatttttttcagattggctccctgctgatgtttttcgcgcttcttttccataaaagaagaccctccttcaaaacagaataccaataggattggcttttatttccgtttttatgcagataagatatcctttaaagccaactcaagttcttcatacgtaaactgaaaaccggatgtcagcgcctgcttaggcagggcgcgctggccttttacgatcagcaggctcatttctcccaaggccttctccagaaaaaattccggtacgggaatccaatggggcggtgcaggacgcttgcgatcgtctttccgaattgcttcatttctacgggattcggcgatgtcacattcatgggaccggacaagtcatcatgctccgccgcaaaagcaataagttccgcggcgtcatcgacatgaacccatgacagccactgccgtccagagccgacggtgccgcccgctaacagcttataagggagaaccatgagcggcagggcgcctttttcaccgagcatcacgccgaatctggcatataccgtccggatgccgagcgcttcaattttctggccttcacgctcccacatatgagccgtatgactgagaaagtcttcatttgacgtatcggactgctcagtgaacgttttctctgtgcttgtgccgtaaatgccgacggcgcttgcctgaatcaaagcccggggttttttcggctgctgcttcataatccgtctgacttctctcgtcgcttctattctgcttgaaatgatttgttccttcgttgtgtccgtccagcggtcaaagatggatttgccggcgaggttcacccatacatcaatagggggaagctcgcgctcaggcgccgcgttttcggccagccattgaacatatgtcacatttttttgttcggtttctctctgttttcttgataaaatatagacatgatgtccccggcgggtaaacacacctgtcagatgccggcccagaaaaccagtgccgcctgtcatcgcgatattcatatccatctctccttacacgttgatacatatactgtacctcatttgccaaaaagaaaaacgcctgaacatcggggcggggaaggagaccgggatgccgtttattacaaaaatatcgacccaaaagaaaaataccgagcgcttcaacatctttcttgatgagaaatatgcattcagcgtcgacgccgacgtgcttgtgcgttttgacctgaaaaaagggaaagaactggacgagcttgacattcttgaaatccagcacggtgatgacgtgaaaaaagcctttaaccgcgccgttgaatttttatcatatcggatgcggtctgaaaaagaagtccgggatcacctgaagaaaaaagaaacaccggacatggtcatttctgaagtcatccataaactgtacgattaccgctacttaaatgacaaagaatttgccgaagcctatgcgagcacccacaaaaaaacaaacggcaaaggccctgacgtcctgttccgcgagctgaaagcgaaaggaatagacgacgataccatcaaggagacgctcagcgcgtttacatttgatgagcagatacaagaagcgctgaaacatatcggcaaaatcctcaaaaaagacaaaaagctgtccacaaaagagatcagacagcgggcgcagatgcagcttcagcgaaaaggtttccctttcgacgtcatcaatgccgctctggagcagacggagtatgaaaatgatgatgaagccgagatggaagctctgaaggctcatgcggaaaaagcgatcaggaaataccgctatgacggcagctatgaaagcggaatgaaggtcaaacagtacttattcagaaaaggattctcgattgacgatattgatcaattcttgcaggaagaggagtaaactgaaatggacaaacgatacagtcaaatgacgcctcatgaactacagacagaaattgcgggactgacggaaaaagcgcgtaaagcggaacagatgggcattgtaaatgaactggccgtgcttgaacggaaaattacgatggccaaagcttacatgctgaacccggaagactttcggcccggcggggtgtatcagatagaaggttctgatgacactttccgcattgattacatcaacggcgtattcgcctggggacacagatcttccccgtctgacggggaagaagcactgccgatttccgttttaaaagaaaaataataacaaaagaggccggttccggcctctttttcttttcgggcacattcgtttcaacctttcagtaaaaaatgattgaattcatttttgatatcttttaagatggaattcgttgttttttaataaaaaggaggcgatttgcgttgaatatcaaaatgaaacagccatctgtgaaattaatgatttttgttttaatgatttgcacattttccatcgggtatacggaatatgctgttatgggtattctgacgtcgattgccgatgactttcatatacatgtatcttcagcgggcatgcttgttacggcgtacgcggcaagcgtctgcctgacgggcccgatcgtaactattatcgcggttaagctgccgagaaagccggtgctgctagggttgatgggcatcttcgtgcttgccaacctgatgagcgtctttgcgccgaacttcgccgtgctggcgatttccagaattttatccgcatccattcacggagctttttttgcgatcgccatggtgtttgcaagtgaaatggtgccgcctgaaaaacgttccgccgccgcggcttccatgaacggcggattaaccgtggcgctgatgctcggcgttccgttcggctcttatttaggggatgcccttaactggcgggccgtctttttcattatttctgttttaggcctgatcgggctgatcggactgatgctggtcgtaccgaaccgaaaaccgaaagtgattccgatgctgatgaatgaatggagtgtctttaagcataaacaagtgattttttcctttgcgatcaccattctcggctactcaggcgtctttatcgcttacacgtttattgagccgattttaagagattcagcggggttcggcacagtcggcattacaggcgcattatttgcctacggtctcggcggagtggcggggaatttcttcgcggggaaagtgccgctcaaactgctgacgcgcacgatgatcggtgtgatgatcggcctgatcggcgtcttggcgatttttccttatatcgctgtttttcccgccgcagccgtttcagcgacatttttgttcggcgcatgtgcgttcggcacgccgccgcttttgcagaccaaggttatttcctcctctgaaaacggcacgacaatcgccgctgcggtgagcgtttccgcctttaacctggcaaacgcgctcggcgcctggatcggcggattgattctcgggggaacgggatcttactcatggctgtttgccggcggtgcgctgatgacggctctcggccttgtgctttccacgttcgctcatctgtctgagaagaaagatgtttatgaataccaagtgcataaaggataacaaaaagcttgcaggggatattccgcctgcaagcttttttcaatgtttcaacgtaatgctgatcaccgtatgtttatcgctctcagctaaggaaatattccgggtttccggtaccccgtctttttcaaaaacaacggcataggttcctttcgcgccgcttttccatgtcatctcaccgtggtgatcagtcttgcctattatctctccgcggtctatattcggctgatgatctgactccgccgctttcatcacggtaaccgtcacaccggccgccggtgaaccgtctgcattctcaacatggagcgtaacgggcagtgcttttttggcggcggaatcatccgctttgccgcatccgcataaaacggctgccgcgagaaagaagacaaaagctttattgatttgaccaatattgaatgttgtcgaatacactgtttgtcacccttgttcccagattgtaagacgacccgccgtttgtatgaatggcaatggcggtctggccggtgtcgctgtaattgcggtaaacgggcgatccgctctggcagccgaacgtatctgtcgtgtaagtgagtttatatgtctcggcagaacgtatcggcttgctgtccgaccacatggaaccggacactttgtcgcacggataccctgtcacggttgaggaaagcccggccggactggaactgttggtcgtccgatagccgtaccagccgacagtattcccgggcgacccgtttactttgattgcgccgtagtcatagtttgtgtcaccgttttctgtccaccctttgacactgtagaatgtcttgcctgaataagagtcgtacgggtacgatgacccgttgcggccgggagctgccgtaattttcgatgcccagccgtttttctgatcatacacgcaatgtcccgccgtaacgatcgtgtcagcattgacaaaaaaaccggtgcatccgtaggtgcttgtgctgccgctgtatgtaacggtcagctgtgctgtcgcgcgatatggaaatgatgttgtgggagaaattctgattcgttcgtctgtcccaataatactggaaggctttaatgacttgatgtcagctttgctgttttgtgcaagctgtcttttggtgaggcccgttccttcataagcgggggatgtctgtgttgtttgtacaggctgattctgatttgcgtcaaactcctcaccgctgtttgatacagatgtctgcgggctgcccgctgcttctgctgaaacagcaaataatgaaactgacagtaagaatgcggtaaggctcagcaatcgttttgaaactgtcttcattttataaaacccctccttttttgtctaccggcttgcggtttagcatttaacatattatggaatttatttagcgttatgaccgcaagaggatgtttttttccgcaaaaaaaagaccgggtcattcccggtctcttacggtgtgtgttatcgtctgcctgaagctctcatgcgctcttgcgggtgcgaattaattgaaccgtccgcccgtttagaagcgtagtcatcctttgcccgcggttcgccttcaaacttattattgttctgattaggaaatccttttgccttgttccggaccatttgttttccccctcggccaatatcaaaaggttgcgccttctggactgaagacgtaaagttagtatatgcctgtgacaagctgcgtaaaagcagcaggttttcccaaggaaaggagacagagacatgaatacatatatcgacaaactgacgaatttgctgcttgagaaaaatgacatgctcagctatttgcaagcgcggacttgggttgagcttttatggggagatttcgaagcgacttacgcaaaagccggccgcccgtaccaaggagagcaaatgacggaacgcgtcgtcaaggaatggatcgaatcatacggcagcaagctccatatgttccaaagcgttcgggaagacgtttctcattatttggatcaaagcaggggtctcctgcattaatatagcagtgcgcccgccggataccgtccggcggttttttctttttataaaagaaatgggaaaatcatgtttgacgaccggcggaatgtggaaatgtgtaataacttataaaatagcggggaggaaccacaatgaacatgaaaaaggggttaaccgcatttattccggccgcaggactttgcttatttttagccgcaggcaccgttttttttgatccggcagcgaatgccgcagcagttcatcagacaaaaatagacaccgcagcagatacatatatcgtgaaagcaggagaacttaacgtccgcaaagaacccaataaacaagggcggattatcggcacgcttcgttcagaggattccgtaaaggttaaacggcttcaaggagcagattgggctgaaattgactacaaaggtcacaaagcctatatttccacgcattttctgatgaagcagccggtgaaggcggtgaccgcgaaacaaaccgatttttatacgccgactttggaaaccggcaaaaaagggtctgttaaagcgggtgaaaccgtcaatgtgctcggctgggggttcagccatgacggaggatttgaccgtaaatgggcgtacgtcacatacgccgggaaagcaggttatgtaaaaacggccgacttaactcaaaagtaaagattcaggcgggcgaataagcctgctttttttctgaaacctttcgcctttcctttcgtaaaagatgaaaaggagagtgacggatatgataatggtaatcggcggccttctgatggctgcggccggcatttcagtcacgttttttccgccgaagtcgatcaacagcctgtacggatatcggacgaagcgctctatggcggatgagtcgcagtggaaagaaggcaatcgattcagtgcgctcctcatgattctgttcggccttatttcggcggcagctggatttgcgggcagcctgcttatccggctgactcagccgttcgccctgatcgttcaggccgtattgttgatcgcgatcagcgtactgatcatcgtcttaacagaaagaagattgaaacaaacggggaggagaatcgatgaatgacattacgtttcacatgatcgaaacaaacggagtgacgctgcacacggcttcagccggtccgaaagacggtcctttggcggtgctgctgcacgggtttccggaattctggtacggctggaagagtcagatcaaaccgctggcggatgccggataccatgttgtcgtgcctgatcagcgcggctataatctcagtggcaaaccggagggcattgaaaactataccattgatacgctcagagacgacattatcgggctgatcactcattttacagatgacaaagccgtcgtcatcggacatgattggggaggagccgtggcctggcatttggcatccacgcggccgcaaaacgttgaaaaattgatcacggtcaatatcccgcacccggcggttatgcggaaggtcacaccgttctacccgccgcagtggaagaaaagctcttatatcgctttctttcagcttccggaaaagccggaacggagattgtctgaagacgattaccgcgtattggatcacgcgatcggcttatctgaacgcccggcgcttttttcacgggaagatgtcgacagctacaaagaagcatggggcagaaaaggagcgctcacggcgatgctgaactggtaccgggcgatcagagccggcggtttaggccctgccgttccgcttaaaatgcccgttccgtaccggttaatatggggcgtcaacgaccgcgcgctgagcaaaaagctcgccaaggaaacaaaacggatgattccaaacggcgacttaatcttcatagatgatgcctcacattgggtcattcacgaaaaaccgcgcatcgtcagccatttgattcatgaataccttcagcaataaagtctgtcccgcgtacagactttttcttttttttctcatatctgccgaaaaacatgacaaaatataaatcatatgcagaaaaaaatttctttccctgtaacaaaaaaagggtttaaacgtcattaaaaaaaggaaaagccttactgaagttttgcggacaattcctttaaggccgtcctaaaaaaagaataatacaaagaaggtgccttcatgaaacaaaggttaatctcaattattattccgtcttacaatgaagggaacaacgtcaagctcatccatgaatctttaaaaaaagaatttcagacgattcattatgactatgaaattttctacatcaatgacggaagcgcggatgacacccttcagcagattaaagaactggccgccagaaaccatcgcgtcaaatacatatctttttcccgcaacttcgggaaagaagcggccattttggcaggatttgaacacgtgcagggcgaagcggtaatcgtgatggacgccgatctgcagcatccgacccatctgctgaaagacttcattcaaggctatgaagaagggtatgaccaagtcatcgcgcagcgcaaccgaaaaggggacagccccgtgcgttccgtgctttcttccctgtattataaatttatcaacaaagccgtcgaagtggacttgcgtgacggggtcggagatttccgcctgctgagccggcaggccgttgatgcccttttgaagctgagtgaagggaaccgtttctcgaaagggctgttctgctggatcgggtttgaccagaaaatcgtattttatgaaaatgtcgaaaggaagaacggcacgtccaaatggtcattcagcaatctgttcaactacggaatggacggtgtcgtctccttcaacaacaagcccctcagggtatgctttttcaccggtattctgatattgcttctgtcgatggtttatattgtaacgacctttgttcatattctgacacacggcgtgtccgtacccggatacttcaccattatttccgccgtgctgtttttagggggcatccagcttttgagtctcggcatcatcggagaatacatcggccggatttactatgaaacaaaaaaacgcccgcactatttaattaaagaagcgaatataacgtacggagaacaaaatgaaacgaattatacaaaaaagcgcaagtggaaccattaaacagccgccgctgtgcgcagggtctggggacgttgtatgaaaaaaaataaatggatcttgccggcagcctgtgtgctggctgcggcagccgctcatatttttttcttaaaagagtggtcggaaggccgctatatgacggggtctggagacgggatcgcccaaatggcggtcttcaaaaagctgctgtttgatcaatatatgaacggcaggctgttttacagctattcgttcggactgggcgggggagtgtacagtcagctcggctattatttctctacttcttttctattcctgtttatctccgccgctgtccgctttttgcagcttattcagctgacgggtgaggctgatgcgctgttttgggcgcaggcctccgtttttatcagcatcgccaagcagagtttcatcatattcacggcggcgtgtgtgttccgctatttcgtcaaacggacggtgcctgcttttgccggcgccgtgttgtacggggtctcgattatctacttccggcatgaggtgtattgggactttttcactgacagtatggtgtggctgccgctgctcgtgctcggcgcggaaaaaatcatcagggaaaaaaagccggcgtggtttatcttcgcctgtgcgctgacattgatcaacaacttttattttgcgtatattaatctgattttcatcggcatttatatcttattcaggtggatgatcccccttgaaggcaatgaggcgaaaaggctcgctcaatgcaggatatttattctgtcgggccttctcgggttcggcataagcgcagtttcctttatccctgtcgtatacggatatcttcataatctgcggccgccgtattcagagcaaattgcatggcttgatttttccgacaacattttattttcaagccggataatcattctgccggcggtttttttactttttctatttacattttctttatataaaaaccggctgttccggctgtttgcgggaatcagtctgctgtacattctgtttcacttcagtccgtttgcggcaagcgcctttaacggtttttcagctccgcaaaacaggtttgaatacgtcctgtgcttcacgattgccggaacggttgcagcagggctttctaagctttcagacatcagcatgaagagtatgctgatatccgccgtactcgccgttctgctctattggagccaagtgagacggttcagcctggatatttctgatcaggccaacctgcctatcctgctccttctggggctgaccattgccgctttccttgcagcaaagacaagactgaaaggcgcggtgtccgccgtctatgccgtcattctcttgacggcggtgctgacggctaatacatatgaaaaatatgcgttatcagaaggcgggaagatttatacggtatcgcatacctttatgacgggtcctgactataagggcaaagaacaaacagagcttattcagcgcctgaaagaaaaagaccctgatccgtttgcccgtttggattggatgaacggtgttttcaataacactccgatcatatacgggttcaacggattcagcgtatattcaagcatactgaaccgcaatctgctgtccttttactggaacgacctccggattgacatgggcagggaaagcgtcagccgttatgcgacattaggaaacagggctaatttatacagcctgctttacggaaaatattatatgacggaaaaaacaaacggggccggcgtgccgtacgggttcaaaaaaatcatggaatcatcccattatgcggtttatcaaaatcaatatatgcttccgttcgtacggacagctgatcgcgtatataacgaggacggtctgaaaaaagcgccctcccttgccagagaacgggcaatgcttgacgggatcatcacggaatcaagcgcagccaacacgaaaaaagcgcctgaggcgaaaaatatgatccgtcaggcaaaggtaacggccgaccatgcggattatcaagacggcatcctgacggtaaatgaagacggcggcggcctgatcattacgccgcaagccgctaagatggacggcggcgattattacgtcagcttttatttgaagaataaagcgaaggaccagggctttacattaaaagtgaacgattacacgacaacgagaaaatcgaatcaatccatttacaaaacaggtgtcaacgatcttactgtcagagtgccgaaaacaaaaaacatccaaatccgtctgccgaaaggatcgtatcagcttgacaggctggcgctttacgaagaacggtacgatacgctgaaaaacgcataccgaaaagcggaaaaagaaccgcgggccgatctcagatggcgcggaaatacgcttcatatctcgtatgaaaacaaaaccagcgcgccgtatatcatgcttccgattccatatgaaaaaggctgggagctgaagataaacggcagaaaagaacagattgaaaaagcggattattcctttatcggatttaaagcgcaaaaaggaaaaaacgatattcaattaacgtattacccgccgttttttaaacccgcggccgctctatcggtgatcagcctcgtgtttgccgcattatatgtgagaagacaaaaaaagcccggctcttaaacagagccgagctttaattttttctgcagtttttcctcgctgaaaatccagcccgtgtaggaagagagaagctctaaatcatgactgaggtggacgatggcgacaaaaggatagtggcctttgctccggtagcgcaaatcaataaagcgcacctcataatgatctttaaaagtatcgacctcccacctgtaaacgggggaaaatgaaagaaaggctgcaatattttcgtcctgtttcgcggccttcatcacatcggtttccggaacgggcacgcggttgaatgtatccaatatcacgacatggccgtcaaggcttctgccgacataaaaggcatgggccgtcgtcacggcgatacgccactgcctgaatttcatcgtcggcgaaataatgatggtttcaatctcctcttcaatcatttcgcgcagccttcgctttatccgcagctgcatcaaaaaccggacggcgtaatatcctgcaaggatgatataaagcatcagaaatgtcacgcccggatgacctccgatataccaaacggcaatcgcggccaaatggctgacgaaaataaacggatcaaaggtattgattaaaccgagagcgatccattttctcgaaaacgggcggatggcctgtgtgccgtacgcgttaaaaatgtcaacaaacacatgcaaaacgacagccagaagcgtccacagccacaggtgcaaaaagttcgcttccggataaaacataaacaaaatgcccggaatcagaacggaccaaaataatacggcgggaatggagtgcgtgaatcctctatgatttcgaatataaacggcattatttttcagcttcaatatggtatcaatatcaggtgcctgagagccggcaagcgcggcgatcataactgcctgagacattggggtgtgcatgccgacggcaggatcaagagttgcgattccgccaagcgcgatacccatgacaacgtgagtgccagtatccattgttgacctcctagcaggcgttaaaaatcagccgcccgcatatttcgcattataagatattccccattttctgtttgcccaatcatggcgtttatccgccgttctcatatgtttccgctttttctttatcactatttaatgtaacatattatcgtaacgtgcccttagtttacaccaaaatacagtgtcaagaaaagcggaacccgaaacatctgaggagaagatatgaacgcacttgaagaaaaaatgaaacaaaaagatatagacaaatttcgcgaggacttaattacatggttcgaaagagaacagagaattctgccgtggagagaaaatcaggacccgtatcgggtgtgggtgtcagaggtgatgctgcagcagacgcgcgtagataccgtcattccttatttccggcggtttgttgagcaatttccgaccgtttcggcgctcgctgaagccgatgaggaaaaagtgctcaaagcctgggaagggctaggttattactcccgtgtaagaaatctgcaaagtgccgtaaaagaagtacatgagcggtacgggggagtcgtccctgccggggaaaaggaatttggcggactgaaaggcgtcggcccttatacaaaaggcgccgtgctcagcatcgcatacaacaaaccgattcccgccgtagacggcaatgtgatgcgtgtcatgtcgagaattctttccatatgggacgatatcgcaaaacctaaaaccagaaccattttcgaacaggcggtatccgctttcatttctcatgaaaaaccatctgaattcaatcagggtttaatggagctcggcgcgatcatctgcaccccgaaatcaccgtcatgcctgctttgccccgtacaaaagcactgttcggcatttgcggaagggacagagcgggagctgcccgttaaaagcaaaaagaaaaagcccggaataaaaacaatggcagccgttgtgctgacagacgaacaaggcgatgtctatattcataaacggccgccaaaaggcttgctcgccaacttgtgggagtttccgaataccgaaacccagaaaggaatcaaaaccgaaagagagcagcttgaagcctatttagaaaaagagatgggaataaccgctgaaatcggggagctggaaggcatcgtagaacatgttttcacccatctcgtctggaatatttcggtctttttcggtaaagtaaaacaagtgtcggatacaacggaattcatacgggtcacaaaagaggagctcaaggaatacgcatttcccgtttcccatcaaaagatatggaaaatggcggaagaaagcggccgctaaaaagcgtcagtcatagctgacgcgagtgccgtggccgtaatccgcttcattccgtttcagtccgccgcgggcttcgatttcctgaatcagttcccggtatttggactggccttcttcgtttaaatacggcataatttgctggaaggcatgatggaaataggcgagctctgaatctctccaatcttgtttgggcatcatggccaattcgcccatatcacgtccgacatacatataaaagacccctttcaacagatattgcttttattgtttgttgaatgaaaagaactatacacagcaaggagctgaggaaaaatggaacaaaataaatgcgcactgatcacgggaagcagccgaggcgtcgggaaagcagccgccatcagactcgcggaaaaaggatacaatatcgtcatcaattacgcccgcagtaaaaaagcggcattagaaaccgccgaagaaattgaaaaactcggcgttaaaacgctcgttattaaagctaatgtcggccagccggcaaaaatcaaagacatgttccgccagattgacgaaacattcggcagactggacgtgttcgtcaataatgcggcttcaggcgtgctgagaccggttatggaactcgaagaaacacactgggactggacgatgaatatcaacgcgaaagcattgcttttctgcgcccaggaagcggcaaagatgatggagaaaaacggaggcggccacatcgtcagcatcagctcgctcggcagcatccgctatcttgaaaactatacgacggtcggtgtctcaaaagccgctttagaatcgttaacccgttatctggcggttgagctttctccgaaaaacatcatcgtaaacgcggtgtcaggcggagcgattgatacggacgcgctgaagcatttccctaacagagatgaactgctggaagatgcccgccaaaatacgccggccggcagaatggtcgagattaaagatatgatcgacacggtggagtttttagtttcttcaaaagcggacatgatccgcggccagaccatcattattgacggcggacgctctctgctcgtataagttttaaaaaaagatgaatagccttatcgtctcctgcgcattctaaagtgcgtggaggtgataacaatggcaaactcaaaatacagcaaaacagacgttcagcaggtgaaaagacaaaaccagcaatcagcttccggtcagggtcaatacggcactgaattcggcagtgaaactgatgcgcagcaggttagaaagcaaaaccaatctgctgaacaaaacaaacagcaaaacagctaatcactgaaacgaaaaagcacttcatcttcggatggaagtgcttttttctgttgctaaaacgacaaaacttgtgattcctctacagaatgagtcaaagggttttccggcgtaaaatcgaaatggtaaggagtatcaacctaaagcctaaggaggaacccgatgtcagagtttgaaaagcttgtaagtgaacagatgaaaatcatggatcagcttctcgagctgcagtcagaacttgaccgctgccggcaggtggaagcggaactcatcagtctggaaagagatgcaaagctggacaatgtacaggacgaaattgcgacaaagcgaaaagacctggccggcatacaggagttattccaaaggcagacagagcaagtcatccagtcttatcgcagcacggaaaagccgtcttcctatgtgcagaaatgaatgtgccattccggaagcggagtggttcttttattttcattttttaattcgtaacgttataatagtgaaaagacttgtcggaaagcaattgcggctgcattgactgcagggctttacagaaagtaggggagaaatatgggatatcccaaggaaggagaaaccattcaaattcacagctataagcataacgggctgcttcatcgaatttggaatgaaacgacgattttaaaaagtacggaattgtgtatcatcggagccaacgaccggacaatggtgacggaatccgacggacggacgtgggtgacgagagagccggcgatctgctactttcatgcccgtcagtggtttaacgtcatcggaatgctgagagatgacggggtacactattattgcaacatcagctcgccgttcgcttatgacggagaggccatcaaatatattgattacgatttggatgtcaaggtgtttccggatatgacgtataacattcttgacgaggatgaatacgatgaccaccgcaaatcaatgaattaccctaaagagatcgacagcattctgaaggagtatctgaatacgctgctgcattggattcatcagcggaaaggaccgtttgctccggaatttgttgatatgtggtatgaacggtatctgcgctatacaaaataaagaatacaataaaaaacctgttggggtgtcaacaggtttttcacatgggctcacacgccttaaagagagagggggataaagtgtgggcgtaatcagacgctatatgcaatttgtaaaaccttataaaaaacaaatttttatcacagtgttaatcggcattataaaattctccatcccgctggctctcccgcttctgttaaaatacgtggtcgatgacattattcaagggagcggaacggcaagcgctaaaacatcatcgctattcacgataatgggcatcatgttcgtgctgtttttaattctgcgtcccccggtagagtactatcggcaatacttcgcacaatggacgggcagccgggtgctctacgatatcaggggggtattgtttgatcatattcagaaattgagcctgaggttttatgccaacacgagaacgggcgaagtcatttcccgggtgataaatgatgtcgaacagacaaaagactttgtcataacgggactgatgaatatctggcttgatatgatgacggtgctgatcgtcatctgtattatgtttacactcgatgtgaagctgacattgatatctgtcattttgtttccgttatacggaatttcagtgaaatacttttacggccgtctccgaaaactgacacgtgagcgttctcaggcactcgcccaagttcagggacatttgcacgaaagagttcaggggatgcccgttatcagaagtttcgccattgaagattatgaacaagccaattttgatgaaaaaaacggacattttctggacaaagcgatccgtcatacgaattggaacgcgaaaacgttcgcagttgtgaataccattacggatttggcgccgctgcttgttatcgcgtttgcgggttattttgtcataaacggcccgctgacggtagggacgatggttgcgttcgtcggctatattgacagaatgtacaatccggtcagaagattgatcaactcatcgacgacgctgacccagtcgatcgcttcaatggatcgcatatttgaatttatcgacgagccgtatgaactgactgataaaccgaatgcattaaaagctgacggcattaagggtgaagttgaattccgaaatgtctcgttccgttatgaggaaggaaaagaaacgattttgcaggacgtttccttaaaggtgacaaaaggggaaaccgtcgcgctcgtcgggatgagcggcggcggaaaatcgacgcttgtcagcctcataccgcgtttttatgatgtatccggcggcagcctgctgattgacggcacagatattcgcgattatgaagcgagaagcctccgcaatcaagtcggaatggtgcttcaggatacgtttctgttcagtgagacgattcgtgaaaatatcgctatcggtaaaccgggagcgtctctggatgaggtggttgcggctgcgaaagcggcaaatgcccatgaatttattatgaacttccccgaaggctacgaaaccaaagtcggcgaacggggcgtcaaattgtcaggcgggcagaagcagcggatttcgatcgcccgtgtattcttaaaaaatccgccgctgctgatcttggatgaagcgacatcggctcttgatcttgaaagtgaacactacattcaggaagcgatggaaaagcttgcgaaaaaccggacgacttttatcgtcgcccacagactgtccacgattacgcacgcggataaaattgtcgtcatggaaaacggcgccgtcgtcgaaaccggcacgcacgaggaattaatggcccaaggcggccagtacagacacttatttacgattcagaatttgaactgatacaaaaacgtatgccgtccgaatgggcggcatacgttttttgaatgcaaaaaaacccggttttacggaagcaccgggttactcttcgtctgtttctaattcgctgtctttcgggtggtatgtctgaaaactcgtaattagcgtatcgagatgctccagctgctcgcggtattccgcaaccgcagccataatgctgagcatattgtaatcaagcagttcatcctcgcagttctgctgatttttcaagaaagacttcgtcaaaagctgtttatatcttatgctttcttcagcatcgtcatcatgcggtttgatcttgccgaccgtccgcatcagaatcctttcgtgccaatgaagcagataatcaatttcttctgtcagcgtctcctgaaattcctccggcatatgataaatctcgttttcatagcggtgcagctttttcagcgtatcaagcgcccgatttgccgtaataatcgcctgtctgaataaaacaagcttgcgcgactttacatacgtcgttttcttaaagtagcttctctcctctttataaagaaggtacgtatgatcaagcttcatcattttttccttcagcttctcaatatcctctttcaatatcgagtgttccgtagactgacgcatcgtcagcctgatccatttcatgatctcatcggtatattcaaccgtatgatgagtcagcttcgtttcgtatttcggcggaagaaacacaaggttcacaataaaagaagacagcacgcctaaaataacggtgcttgttcgtatcagagcgaacgtcaggaagctgtttcccggtgtttctaaaatcgcgataaccgtcacgagcgcaatcgaaatggtgtgttcaattttcagttttaacatgatcgtgatgacaatcactgcggtcaatccgatcataatcggactcggtccgaaaatcagtccgaataccgtagcgatgacagcgccgatgatatttgcctgaacctgatcaataatgataagaaaagacctgtaaatagagggctgtatggcaaatatagctgcaatcccggcaaagatcggcgacggaagtccgatccatgatgctaagtagagcgcgagcgtaatcgcaatccctgttttaaaaatgcgggcaccaagtttcattggtttgtgcgtgcattcctttctctaataaattatgtgccgaacgaacggctgacacttacatttccctgtcggctgatttgctaaacaataaagtaatatacagggatcataccaattattcaaggtctttttttgaaaaaaccattatctcacaaatcggacaaaaagaaaaagcggaagccccgggctcccgcttgtttcagaagttattttttcatatgtctgaacgcatcttcaacggcttgtaaagtggcgtcgatatcctcttcagtatgtgcggttgtgataaaccaagcttcatacttcgacggagcgagattgatgccgcgttcaagcatcagcttgaagaacttggcgaatgcttctccgtccgtattttccgcctgctcgtaattgacgattttttcatcagtgaagtaaaccgtgagcgcgccttttaaacggttgacggtgatggtaatgccatgtgtctccgcatgggcgagaatgccttgctcaagtctggcgccgagctcatcaagccgctcgtaaacgccttcttccttcagcacttccaggcaggcgatgcctgataggatagatgccgggtttccggccatcgtgccggcttgatatgccgggccgagcggagcaacctgctccatgatctcttttttgcctccgtaagcgccgatcggcaagccgcccccgataattttaccgagcgccgttaaatcaggcttcacttgaagaagatcctgcgcgcctccgtacataaaacggaacgccgtgatcacttcatcataaatgacgagcgcgcccgctttatgggtcaattcatttacctgttctaaaaatccttcttcaggttcaacgatgccgaagttgccgacgatcggctcgacgagaaccgctgcaatttctgaaccccatttatccagcgcggctttgtagctttcaatatcattgaaaggaacggtaatgacctcattggcgatgcttttcggcacgccggcggaatcaggggtgccgagcgtagacgggccggaacccgcagcgacaagtacgagatcagaatggccgtgatagcagccggcgaatttaatgatttttgtgcggcctgtataagcgcgtgcaacccggatcgttgtcatcaccgcttcagtgcctgagtttacgaatcgtactttatcaagtgaaggaatggcctccttcagcattttggcgaaagtgacctcatgtttggtcggcgtcccgtacagcacgccgttttccgccgctgttttaatcgcttcagtaatatgcggatgggcatgtccggtaataatcggaccgtaagccgctaaataatcgatatactgattcccgtctacatcccagaaataagcgccgttcgctttttccatcgcaacgggtgaaccgccgcctaccgctttataggatctggacgggctgttcacgcctccgacgatatgctctaacgcttccttatgaagttcaactgattttgtatacaaaaaatgaccctcctaatatctccttacatcatgttctattgtagcatgcttcattgcgagcacaacgggttcatgcttccagaaaagagccgggggataacggttgtaatcttaacgtgaattggatacgcttaataaaaaacccggaggtataagaaatgacgattgaaatcggacaaacagcaccggatatgaaattagtgaatgacagcggggaagaagtagcattgacggattttaaagggaagtacgtcgttctctatttttatccgaaagacatgacacccggatgcacgacggaagcatgtgatttccgtgatcagcacgaaagtttcgcgggacttgatgcggttatcatcggagtaagccctgacagccgtgataaacatgaaaaatttaagcaaaaacacgatcttcctttccagctcctcgttgatgatgagcacaaactggcggaagcttttgatgtgtggaagctgaagaagaattttgggaaagaatatatgggtatcgagcgatccacttttttgttagacaaagaaggccgtcttgtgaaggagtggagaaaggtaaaagtgaaagatcacgttgccgaggcgcttcgtgaattggaacaaattgcgtctaattaatggacaaatgctgaactcacggggttttcttcagattacatttgacaggagaccggaaaaagatgtacactaattataaacattataaagtaagaatcttttttagaagagaggtgcatgacggatggctgcacatgaattaaaagaagccttagacacgttgaaggatacgggagtccggattactcctcaacgtcatgccattctggaatatctcgtggattctatggcacatccgacagcggacgatatatataaagccttggaagggaaattccctaatatgagtgttgcgacagtgtataacaatttgcgtgtattccgggaagcggggcttgtaaaggaactgacgtacggagatgcgtccagcagatttgactttgtcacctctgaccattatcacgccatttgtgaaagctgcggaaaaatcgtggacttccattatcccgggcttgacgaagtggaacagcttgctgctcacgtcacagggtttaaggtaagccaccaccgtttggagatttacggcgtctgccaagaatgttccaaaaaagaaaaccactaaacgaagctgaccgctttgatacggtcagcttcgtttattttacactgttttttctgttataagactcatcgaacgctttgccttccaatcctttatccaatgtaagcggctctctgcaatgcatgcacatatccactctgcccagaatcttcgtttctttctcgcaagcggggcacatcacccggaccgcttttgtggacagcatgccgatccaaaaataaacggcggtgctgagtccgatcgacagcaggccgagaatcataaacaagctggcaagcaaaacagactgcttaaagaacagcccgatgtacataatgataaacccaacgaaaaccaaacttaacgcaaacgttctgatcttattaattttgcttgagtatttcgccatgtccatccccctctcgtttaactatagcacaaaacatatggcatattcttcatgttttcgtaagaaaagggaagaataaatatggcacctgaaaggaaatttgttataatagtgcaatgtgtttagaaaaaaggactttcatgttttatcatagaaatgtagaaacaatagctagtgaaacaatcgcattggaggaatcgtaatggacaatcttctccgtccaatttaccaagaaagagcaagtcatcccgatacgctggccgtccttatgattgagagaaggagtaaagcatcatccatcacggataactttgatgcggtcatgcttgtcattgtgaaacaggctgatgaacctctttttataaagcattatgaattcgaacacaaaaccgcttctttacatattgtaacggatgctctgcttcaggaatggattctgcttgggacaaatagaagagtcatagattggatcatcaacggcaaagtgctgtttgaccgcaatgaatatatatctgaactcaatgaccggctcagcacttttcctttcgccgagcggaaattaaagatcggaatggaatacggcaagctgatcagaagatttgtagaaggaaaagcgttttttgaagctgatcattttctggatgcatattatgcggtagtgcacgctcttcaccacttggcccgcatagaagtgattgaccgggggttttatcccgaaacgacagtctggaaccaggtccgtcacattgagccgcaggtatataagctatattccgaacttgtcgagagtcacgaaagcttggagaaaaggctcgaattattattcttagcaaatgattttctcatccattcaaaagctgaaatcggttctgcgcacctttttcaggtgatgaaagaaaaagaaatgtggcagtttggagaattgcttcagcaccctgaactggtgcacttcacccaagatctcggtgtcatgcttgattacctgacggaaaaaggctttgttgaagtatctcaaatagagaccaaagggcaggaagtatatcatcgaggatattctttcaaaaaaagtgttgacgctgaatcataggcatggtatattattaaacgtcgctgatgcgcttcaccaaaaagctcacagcggcggagaaataaaaacaaaaaaacatttgacagcaaatcgctgaaatgttatactgaaaaagtcgcctcgagatgaggttgagatgatctttgaaaactaaacaagacaaaacgtacctgttaattcaaagttttaaataaatcgcacagcgatgtgcgtagtcagtcaaactactttatcggagagtttgatcctggctcaggacgaacgctggcggcgtgcctaatacatgcaagtcgagcggacagatgggagcttgctccctgatgttagcggcggacgggtgagtaacacgtgggtaacctgcctgtaagactgggataactccgggaaaccggggctaataccggatggttgtctgaaccgcatggttcagacataaaaggtggcttcggctaccacttacagatggacccgcggcgcattagctagttggtgaggtaacggctcaccaaggcgacgatgcgtagccgacctgagagggtgatcggccacactgggactgagacacggcccagactcctacgggaggcagcagtagggaatcttccgcaatggacgaaagtctgacggagcaacgccgcgtgagtgatgaaggttttcggatcgtaaagctctgttgttagggaagaacaagtgccgttcaaatagggcggcaccttgacggtacctaaccagaaagccacggctaactacgtgccagcagccgcggtaatacgtaggtggcaagcgttgtccggaattattgggcgtaaagggctcgcaggcggtttcttaagtctgatgtgaaagcccccggctcaaccggggagggtcattggaaactggggaacttgagtgcagaagaggagagtggaattccacgtgtagcggtgaaatgcgtagagatgtggaggaacaccagtggcgaaggcgactctctggtctgtaactgacgctgaggagcgaaagcgtggggagcgaacaggattagataccctggtagtccacgccgtaaacgatgagtgctaagtgttagggggtttccgccccttagtgctgcagctaacgcattaagcactccgcctggggagtacggtcgcaagactgaaactcaaaggaattgacgggggcccgcacaagcggtggagcatgtggtttaattcgaagcaacgcgaagaaccttaccaggtcttgacatcctctgacaatcctagagataggacgtccccttcgggggcagagtgacaggtggtgcatggttgtcgtcagctcgtgtcgtgagatgttgggttaagtcccgcaacgagcgcaacccttgatcttagttgccagcattcagttgggcactctaaggtgactgccggtgacaaaccggaggaaggtggggatgacgtcaaatcatcatgccccttatgacctgggctacacacgtgctacaatggacagaacaaagggcagcgaaaccgcgaggttaagccaatcccacaaatctgttctcagttcggatcgcagtctgcaactcgactgcgtgaagctggaatcgctagtaatcgcggatcagcatgccgcggtgaatacgttcccgggccttgtacacaccgcccgtcacaccacgagagtttgtaacacccgaagtcggtgaggtaacctttatggagccagccgccgaaggtgggacagatgattggggtgaagtcgtaacaaggtagccgtatcggaaggtgcggctggatcacctcctttctaaggattttaacggaatataagacctcgggtcttataaacagaacgttccctgtcttgtttagttttgaaggatcattccttcaaaacataggaacacctgctaaatgcgccacttcctgtggcaacgcatgtgttagcatgtcctatgcgttgttctttgaaaactagataacagaagtaattcacattcaattagtaatgcaagatatcacgtagtgattctttttaacggttaagttagaaagggcgcacggtggatgccttggcactaggagccgatgaaggacgggacgaacaccgatatgcttcggggagctgtaagcaagctttgatccggagatttccgaatggggaaacccaccactcgtaatggagtggtatccatatctgaatacataggatatgagaaggcagacccggggaactgaaacatctaagtacccggaggaagagaaagcaaatgcgattccctgagtagcggcgagcgaaacgggaccagcccaaaccaagaggcttgcctcttggggttgtaggacactctgtacggagttacaaaggaacgaggtagatgaagaggtctggaaaggcccgccataggaggtaacagccctgtagtcaaaacttcgttctctcctgagtggatcctgagtacggcggaacacgtgaaattccgtcggaatccgggaggaccatctcccaaggctaaatactccctagtgaccgatagtgaaccagtaccgtgagggaaaggtgaaaagcaccccggaaggggagtgaaagagatcctgaaaccgtgtgcctacaagtagtcagagcccgttaacgggtgatggcgtgccttttgtagaatgaaccggcgagttacgatcccgtgcaaggttaagcagaagatgcggagccgcagcgaaagcgagtctgaatagggcgaattgagtacgtggtcgtagacccgaaaccaggtgatctacccatgtccagggtgaagttcaggtaacactgaatggaggcccgaacccacgcacgttgaaaagtgcggggatgaggtgtgggtaggggtgaaatgccaatcgaacctggagatagctggttctctccgaaatagctttagggctagcctcaaggtaagagtctcggaggtagagcactgattggactaggggcccctaccgggttaccgaattcagtcaaactccgaatgccgatgacttatccttgggagtcagactgcgagtgataagatccgtagtcgaaagggaaacagcccagaccgccagctaaggtcccaaagtatacgttaagtggaaaaggatgtggagttgcttagacaaccaggatgttggcttagaagcagccaccatttaaagagtgcgtaatagctcactggtcgagtgactctgcgccgaaaatgtaccggggctaaacgtatcaccgaagctgcggactgttcttcgaacagtggtaggagagcgttctaagggctgtgaagcaagaccggaaggacttgtggagcgcttagaagtgagaatgccggtatgagtagcgaaagaggggtgagaatcccctccaccgaatgcctaaggtttcctgaggaaggctcgtccgctcagggttagtcgggacctaagccgaggccgaaaggcgtaggcgatggataacaggttgatattcctgtaccacctcctcaccatttgagcaatggggggacgcaggaggatagggtaagcgcggtattggatatccgcgtccaagcagttaggctgggaaataggcaaatccgtttcccgtgaaggctgagctgtgatggcgagcgaattatagtagcgaagttcctgattccacactgccaagaaaagcctctagcgaggtgagaggtgcccgtaccgcaaaccgacacaggtaggcgaggagagaatcctaaggtgatcgagagaactctcgttaaggaactcggcaaaatgaccccgtaacttcgggagaaggggtgctctgttagggtgcaagcccgagagagccgcagtgaataggcccaggcgactgtttagcaaaaacacaggtctctgcgaagccgtaaggcgaagtataggggctgacgcctgcccggtgctggaaggttaagaggagcgcttagcgtaagcgaaggtgcgaattgaagccccagtaaacggcggccgtaactataacggtcctaaggtagcgaaattccttgtcgggtaagttccgacccgcacgaaaggcgcaacgatctgggcactgtctcaacgagagactcggtgaaattatagtacctgtgaagatgcaggttacccgcgacaggacggaaagaccccgtggagctttactgcagcctgatattgaatgttggtacagcttgtacaggataggtaggagccttggaaaccggagcgccagcttcggtggaggcatcggtgggatactaccctggctgtattgaccttctaacccgccgcccttatcgggcggggagacagtgtcaggtgggcagtttgactggggcggtcgcctcctaaaaggtaacggaggcgcccaaaggttccctcagaatggttggaaatcattcgcagagtgtaaaggcacaagggagcttgactgcgagacctacaagtcgagcagggacgaaagtcgggcttagtgatccggtggttccgcatggaagggccatcgctcaacggataaaagctaccccggggataacaggcttatctcccccaagagtccacatcgacggggaggtttggcacctcgatgtcggctcatcgcatcctggggctgtagtcggtcccaagggttgggctgttcgcccattaaagcggtacgcgagctgggttcagaacgtcgtgagacagttcggtccctatccgtcgcgggcgcaggaaatttgagaggagctgtccttagtacgagaggaccgggatggacgcaccgctggtgtaccagttgttctgccaagggcatcgctgggtagctatgtgcggacgggataagtgctgaaagcatctaagcatgaagcccccctcaagatgagatttcccattccgcaaggaagtaagatccctgaaagatgatcaggttgataggtctgaggtggaagtgtggcgacacatggagctgacagatactaatcgatcgaggacttaaccaatttgaatgtatgcttactgttatctagttttgagagaattttttaaaaaaactcttgctttttccgaaatacatagtataataatacatgtcactaaaacgtctggtgatgatggcgaagaggtcacacccgttcccatgccgaacacggaagttaagctcttcagcgccgatggtagtcggggtttccccctgtgagagtaggacatcgccaggcagacttcattccgcagtagctcagtggtagagctatcggctgttaaccgatcggtcgtaggttcgaatcctacctgcggagccaattatggagagctgtccgagtggccgaaggagcacgattggaaatcgtgtaggcggtaaccccgtctcaagggttcgaatcccttgctctccgccactaattatcaatacataacaaacgaaaaaataccagggcccgttggtcaagcggttaagacaccgccctttcacggcggtaacacgggttcgaatcccgtacgggtcacttatatgatggaggattagctcagctgggagagcatctgccttacaagcagagggtcggcggttcgagcccgtcatcctccaccattatcatcgcggggtggagcagttcggtagctcgtcgggctcataacccgaaggtcgcaggttcaaatcctgcccccgcaaccaaaaaaatggtccggtagttcagttggttagaatgcctgcctgtcacgcaggaggtcgcgggttcgagtcccgtccggaccgccatttataaaaaggctcggtagctcagttggtagagcaacggactgaaaatccgtgtgtcggcggttcgattccgtcccgagccaccatttgccggtctagctcaattggtagagcaactgacttgtaatcagtaggttgggggttcaagtcctctggccggcactctaaatgatggaggggtagcgaagtggctaaacgcggcggactgtaaatccgctccctcagggttcggcagttcgaatctgcccccctccaccattttataaataggggcatagtttaacggtagaacagaggtctccaaaacctccggtgtgggttcgattcctactgcccctgccactatattatttattcatcttcagattatggcggttgtggcgaagtggttaacgcaccagattgtggctctggcactcgtgggttcgattcccatcaatcgccccatattatcattgggctatagccaagcggtaaggcaacggactttgactccgtcatgcgttggttcgaatccagctagcccagttgcatttttttgaaaacaacagcataagatgtattaagttcttttacatgttgcggaagtagttcagtggtagaacatcaccttgccaaggtgggggtcgcgggttcgaatcccgtcttccgctccaaattacggcggcatagccaagtggtaaggcagaggtctgcaaaacctttatccccggttcgaatccgggtgtcgcctttctattgccggggtggtggaattggcagacacacaggacttaaaatcctgcggtaggtgactaccgtgccggttcaagtccggccctcggcaccaatttaactttgagcgaattatgttaaattggtcatcaattttcttattataaaacatatatgagagtgatttgcatattgcaggtcgctttttttatataataaaagcgtgaagactatcaatataagtttcttgcttgtatcgtatatactgcattaccatttgaaaaaactttactaaaaccattgactctttatagaatgcatgttatatttatatacgtcggttgaacacgacgcattatatgccggtgtggcggaattggcagacgcgcacgactcaaaatcgtgttccttctggagtgccggttcgaccccggccaccggtatacaaaggcttctacatattgtagaagccttttttgttgtatgaaaatatctccaaggcttgtgaaaacatgatacctgcagtaggaggagctggattcggcgcaccgtgcttatattaaggaaacaccgattcggccgtggagttaaatctttccgatcgggctgtttttgctattaacactgtttctcagctggtggggcggccattcaaaagcgcgcattattggcagcggttattgcagtatttgctctttttatgtttcagcgctttcctgcaggcgagcttgttacccattttattaagggcggaaacgaattggtcaacgttattattatgttatcgctgatttgggccgtaacagcagtagctgaaaatctgggattctcgaaatatgttacttctcatttaacatcatggagccctcatatgtttattgcgccgtctctttttatactgggggctgttatatcccattttatcgggtcatcctgggggacttggggcgctcggcgtaacgctggcggttcagttacataccagcttattattagcgagcggaacatttggtttgcttctcccctcagtgataatacggtgttggggatcaatgttgcgaagtatgcccgttcgaagcttgttccggcgattaacgccgcggggatctccgttgtgttatacggtgcgtatttttcagataacaaatactttttgaaggcgttatccgaaattgagataacgcctttttaatgagctgttatacttgagaaaaaaagaagtgatgacattgaagcagattattgcaatgggcggcgggggttttccatggagccggatcatcttgtgctggatcagtatattttagagcagtcggcgcggtcaaagccgaaagtttgttttttgccgacggcaagcggagattcggagaaatataccggcaggttttatcaggcctttcaaaagctgcggtgtgagccggatcacttgtcgctgtttaaaccgccgggttctgatctcagatcctttctcatgaagaaagatattatatatgtcggcggcggaaatacgcgcaatatgcttgtcttatggaaagagtgggggcttgaccttattcttcgtgaggcttgggaaaacggcatcatcttagcgggtctcagcgccggagcgatttgctggtatgaagaaggggtgacggattcagcgggggatttgcgagagttaacagctttaggatttttgccgggcagcttttgtccgcactatgacggagaagcggagcgccggccggtgtatcaccgtctgatttccgaaaagatactcagggagggctatgccgctgatgacggcgctgcgcttcattataaagacggtcagctgttccgggctgtctcttcccgggaaaccgcaaagggttatcgggtttttaataccgaagaaggcgttcgggaaacagagcttatgaccattccgttatctgaattttgataatatgcttttttttgtacacaacttatgttacgatgagagcgaaatcaatagttactgggggtgcccgtctgagcgggctgagagagaagcggcggcttcttaaccctttggacctgatctggttcgtaccagcgtggggaagtaaaggttttattattgttgaggaaaacaataatagtttctttctgactgcaaaaccgggttcttctttgaacccggtttttttgtgctggtgctgagcttggttctgttattcaaatgataaaggagagatttgtatgcaaaatcaatcagtacagcaagcgaacatttccattatgtcgagtttttccggcagtaaaaaggtttatgcagaaggttcttcgcccgacatacgagtgccgatgcgggaaatcagcctgagtgcgactacgggggcattcggggaagaggagaatgcgccggtccgtgtttatgatacgagcggaccgtatacagacccggatgtacagattgatattcatgaaggtctgggggcgctccgcacaaagtggattaccgggcgcggagaagtagaagaatataacggccggaccgtgagacctgaagacaacggctataaaaaagaagatcatgctgccgaataccccggcctgcagcggaaaccgcttcgggccaagccggggaaaaatgtaacacaattgcattatgcgagaaaaggcatcattacgccggaaatggagtttatcgcaattcgcgagcatgtgtctcccgaatttgtcagagacgaggtagccagcggccgggcgattattccttctaacgtcaaccacccggaaagcgagccgatgattatcggccggaattttcatgtgaaaattaatgccaatatcggcaactcggctgttacatcttctatcgaagaagaagtcgaaaaaatgacgtgggcgattcgctggggcgctgatacgatgatggatttatccacgggaaaagacattcatacgacgcgtgaatggattatccgcaactgccccgtgcctgtggggacggtgccgatttatcaggcgcttgaaaaagttaatggcattgccgaggatttaacgtgggacatttatcgtgacacattgattgagcaggcggagcagggcgtggattatttcaccattcatgccggcgtactgcttcgttatgtcccgttaacggctaaacgcacgacgggaatcgtatcccgcggcggggcgattatggcgcaatggtgcctggctcatcatcaggaaagctttctgtacacgcattttgaagaaatttgtgaaatcatgaagagctatgatatcgctttttcacttggtgacgggcttcgtccgggttcgattgcggatgccaatgatgaagcgcagtttgcggaattggagactctcggagaattgacggagattgcgtggaagcacgatgtgcaagtgatgatcgaaggaccgggtcatgtgccgatgcataaaattaaggaaaacatggacaagcagctggaaatttgtaaagaggcgcctttttacacgctcggcccattaacgacggatatcgctccgggctatgaccacattacttcagcaatcggcgcggcgatgatcggctggtacgggacggcgatgctttgctatgtcacgccgaaggagcatttggggctgccgaatcgtgatgatgtaagagaaggcgtcattacgtacaaaatcgcggcacatgccgcagaccttgctaaagggcatccgggtgcacagatccgtgacgatgctctgtctaaggcgcggtttgaattccggtggcgtgatcaatttcatttgtcgcttgatcctgaaagagcaatggaatatcatgatgaaacgctgccggctgaaggcgcaaaaacggctcacttctgttcgatgtgcggcccgaagttctgcagcatgagaatttctcaggatattcgtgattatgcgaaggaaaacggacttactgaagacgaggccgtcaatgaagggctgaaagaaaaagcaaaagagtttgcagagaagggaagccgcttatatcaataaaagaaaagatgaagatggagtgtatccatcttcatcttttttagaaaaacggtgaacggcgaagcggcggaatgctctgctcgaagcggaatatattttccggatcatatttcgttttgacttgacggaggcggtgaacattttctccgtaatacgtttgcagccagtttctgatttctctatcaggccaattcacataatctcccatcgtttctcttgatagggacgttctcagtccttcgatccagcggacattttgtctttcttcttcagcagatgtccaagttgtaatatattcttgggcaatgattgcgttgcgatagtagaatgccgtttggtccggagcgatccgtccggccgccccgccgagagattgctgccagacactggcgttttcgttcggagcgtgctctaaatagcgctttaaagtggatattgcgcgtgttgataatggtttttcaataaaggatcctgaccgcttcatcttttgcggctgattgcctcccgggctgttaaaaaaggctgctgctttaataaatggcactgtcttgaccatgccgcttgtcggttttcccgctttcattaacggagccagcagttctttcagctcctcttttgtcccggtaaattgaccgagtgcttctatgcggttgacttccttaggccaaaactgaattgatgaggtaagccggttgtctgtaaatggagcccagcgctgccacgtattaaatacttcctcgaaatcatcccagccccaagtgacagaaaaaacagacacgcacgagatcggcacggctttaaacatcatggatgtgacaatgccgaagttgcctccccctccgccctgagatgcccaaaatagatcagagtgctttgagcggttgactgtgatcaagtcagcacccgctttttcgtccgctatgatcatttcgagctggaggagacgatcgcaagtaagtccggcagtccttgttaaatatccgattcctcccccgagcgtcagccccgtgattcccacattcgcaatggttcccgcaggaagggtcaagccgtaccgccagagtgtccggtagacttcccctaattcggctcccgcttcaatcgagaccagccgcttatcctcatttactcttattttcttcatttcactgagatcaatgactagtccgtcatttaacagggaaaaattttcgtagctgtgtcttccgcctctgatacggaaaggcacattgttctcacgtgcccatctcaccgcattgagggcgtcatgtttgttttggcaaaacacaatgatgtctggatatctttgcaggcttaaattgaaattggttcttgcggcattatagtccgggtcatcttttttgacgatgcgaccgctcaatgttgtcttttccacattctcactcactttcacttgtaatctgctatgttttctagcatatgcggaaaaatgagagagtgtatgaggaaaacccccggaaggacacgatattttaaattgtagttgacaggtagggattgtatgaattaacataatcattacatatttccaaacgatggctgatcggatcaccgaaggctcttatctattaaacagataagggccttttttgcgtgaaagtcattaaatgaaaagcggagggatgaaaagtggcgttaaaaaaggtatcacatgtgcgcaaaaagagaaaaaagcggaaaaagtacagaaaacacacattgaatttcgaactgcttgtagagaaaaacaaacgggagattatgagaaatgaggaacagatggagcagatttatataaagatagatgaaaagcatgcgggggttcgataaagatgaaggagagaaaatggaggttgaaaacaacggtactcgcgctgtcggtatccatcatgttatcagggtgcgcgttagggagtgccggggaagaaccgtcatctgcggctgataaaaaggaagaaacacgtatcacccatgtcaagacaaaggaatttaaagcttctcatccggcggcgattcccgctaaatcgaaagccagaactgacacttttgttgctgggatttccgcgccgggcggcgtgtttctgccgtacttttacgaaaacggctgggatggaaatgcgacagatcctatttttgaaccgttagtcaaactggataaaacggggaagcctgccccggctcttgcggaaagctggaaaatttccaaagatcagcttacatacacgttccgtttaagaaaaaatctcgttttcagcgacggttcaccgctgaccgcaaaggatgccgcattcactttaacactgctgcatgatcctgcatacgcgggctatgaagatatcaccacggcttatattaaaggcggtaaggcttacaaagaaggaaaggcaaagacgatagagggcattcgcgtccttgatgacagaaccattcaaatcacgactgagaaagtcagtgcgaagtcgctgcttcttttgggcgggcaggtgctgtcagaagcctactacgggaagaaatatcaattcggcaaactggactatttaaaagagctttatgccaaaccgctcggagcgggaccttatcaatttacagaataccttccgggacaggaaatacgctatcaggctaatgaacactattatgccggaaaaccgaaaacggaaaagctgatttataaaattatcgatccgtcaacttcccttcagctgtttgaaacgggtgaccttgattacgcttctttctcacctgatgatgatacggttcagcatttaaaaagtctcggttttgcgaatataagcgtatctgtcgtgaatgattacgggcttgtgtacgtcaatcacaagcgtccgccttttcaagataagaaagtgtcccaggcgcttatttacggacttgaccgtcaaaaaatcgtcgatgtccgctttaaacgctacggagaggtcgcgaatgttccggtgtctccggtttcgtgggcttatgatgacaaaggtgtcaatcggtatgcgtttaaccctgaaaaagccaaaaagcttcttgacgaagcaggctggaaaacgggcaaagacggtgtacgtgaaaaaaacggcaaaaagcttgaaatcagctattacacatctaaagcggatgatgatttcatcccgatagcgaaagaaaattatgcggacatcggaatctcattaaaaccggaagtgatggattttaatacagaagtagcgaaaatcaatgacaaacaatatgaccttgccgccgtttccacctcgcagatccttgatccgaatgacacggtggaaaagctggcttccggccatcccaataatgtgacggggtattccaatccgaaagcggaccggctgatagagaaaggagccggcacgcttgatatcagcaaaagaaaagagatttatcaccagctgtaccgggagctcggggaaaacccgccttacattctgattcattaccgtcagagcgcaagggcggtcagcggaaaaataaaagggcttgaggctgacaattattctggaatcagttcaagtctctcaaatgtctcaattcaatagaacggttgggcaaaatacccgatgcatcctggggattttgccctttcagcggaaaggaggggctttttatgaaacggtatgccgcagaacgattcattcaaatgcttgtgatcttattcggtacgtcctttattatttttttcttattcgccatgctgccgggcgactatattgattccaatgtaaacctgactccggaaagagcgaaggagttaaaagcgctttacgggctggatcagccgatttggcagcgttatgtgacatggctcggaaatgtgctcagcggagattttgggttttctttgaaatatcaggagaacgtcctgtcactgcttcggaaatatgtctggaattcgttttttgtcgcgtttttggcgttgcttgttacatggtcagccgcgatgataacgggtgtcatatccgctgtcaggaaatactcatggtttgacgggatcgtgacgtttcttgtttttgcttccatggcgtttccgtctttttttatcagccttctgtttattaagtggtttggggtggatttgaaaatattgcccgtcggcgggatgattgataccggcagcacgagtacaggtttttcgtacgtgcttgaagccgccagacatatgattcttccggtcgtgattttatctatgctcggcatcggctcgctgacaaggtatttccgctccggcatgctggacgtgatcagacaggattatatcagaacggcgagagcgaagggattgaaagagcgcaccgtcatctggaaacatgcgttgaaaaacgcgcttattccggccatcaccctgcttgcttttgaactgccgggactgttttccggagccatcattattgaacagattttcgggtggccgggtgtcggacgtattcagcttgaatctgtgcattatcgtgattatccggttttgatggcgtttaccttgtttttgtcttgtttaacgattgtagggaacttcttggcggatatcgcttatgccgcggttgatccgcgggtcagactgaaatagggggtgttcggaatgaaaaaacaaaaagaggtgccgccttctctttggaagcagacgtaccgccgcctgctgcagcataagctgacggtcatcagtcttcttttcttatattttatgtttttattgtgctttatcgggccgtctttttctccgtacataacagatcggacggatatttcaaatgccaatcagcatccgggaatccatcactggctgggcaccgaccagtacgggagagatgtgctgacgaggctgatgctggcggggcagatttctctgaccgtggggcttgcttcaatggtgctgtcgcttgtcatcggctctttactcggggctgcggccgggttttatcggggagccgctgatatgatcattatgcgcattgctgatatgctcatgtccatcccgggcctgccgctgcttttgattttggctgcggtgatgtcggagtggaaagtgccttctgaatacagaatgtacctgattatgatgatgttaagcctgatcggatggcccggtttggcgcggcttgtacgcggacagattttgtcgctgaaggagcagctgtttatgatggccgcggaagttttggggcttagtgataaacggaaaatcctctatcatttgcttcccaacacattgccgttattactggtagcggcgactttgcatgtggcgggagcgatgctgagtgaatctgcgctgagttttctcgggcttggcgttgctccgccgacaccttcttggggaaacatgatggaagcggcgaatcattttatggattttacactccgcccgtggctgtggattccgccgggaacggccatttttctgaccgttgtggcgattcatttgcttggagacggtttaagagacgcttttgatcctaaggtaaaacggcaggtgaaaatgaaatgaaaaaaccgcttttagaagtaaggcatttggaaacggctttttatacagaggagggtgcggtaaaggccgtggacggagtcagctttacgatacatgaggaggaaacggtttgtattgtaggagagtccggctgcgggaaaagtatggcgtcattgtccattatgcagcttattcccgagacggggagaatcgaacggggagcggtgcatttttccggacagaacctgttggaactgaaaccaaaagacatgcagaaaatccgcggaagcgaaatcgggatgatttttcaggaaccgatgacatctttgaatccggtgtttacaatcggtgagcagctgaccgaaccgattcgcgaacatttgttgctgagtaagaaagaggcatggcggagagccgttgaactgatcacgttagtggagatcccgaatgccgagcaggttatgcaccgatatcctcatgagctgagcggcggcatgctgcaacgcatcatgacggctgtcgcgctaagctgcgatccgaaactgatcattgccgacgagccgacgacagcgcttgacgtaaccattcaggcgcaaatattggatttattgcgggatatgaaaaagcaatttcgcacgtctattttattcattactcatgaccttggcgtggttgctgaaatggctgattatgtgattgtcatgtatgcgggaaaaattgtggaggaaggaccggttgcagagctgttttctgatccgaagcatccgtatacgaaagggctgctcgcggccaagccggttatcggtcaaaaaagggagacgctttacaccattccggggcaggtccccgagcttgcggacctgtcgggatcgtcttgttattttgcggagcgatgtgaacacagcacggaaatatgccggagatcgagcccgcattttactgaattcgggaaggggcatcaggcggcgtgctggctttacagagaggagaaagcagatgagtgatgtgttgctggaggtcaaggggctgaaaaaatattacgaggagcatggggggatgagaaagactcataaaaaacccgtaaaagcggttgacggtgtcagttttacgataggaaagggagaagtgttcggcttagcgggagaatcgggcagcggaaagtcatcaatcggcaagaccattttgaggcttcatgagaaaacagggggagaggtgttttttcaggggcgtgatgtgtttcggatgagccggcgcgagctcaaaactttcagatcggaagcgcagctcatctttcaagatccgttcagttctttaaatccccggcgccggatcggagaagccatcggtgaagcgatgatcgagcatcaattggcggtgaagcggaatgcgcgtgataaagcggcggaggttcttgaagcctgcggactttccgcaaacttcatcgatcgttatccgcatgaattttcaggagggcagcggcagcggatcgtgattgcaagagcgatggcgctcaaaccgcaatttatcattatggatgaacccgtggcggcgttagatgtctccatccaggcgcagatgatcaatttgttcagcagccttcaaaaacagcacgggctgtcatacttgttcatttctcatgatttaagcgtggtggagcacttatgtacgaaggtcgccattatgtatttagggacgattgtggaatatgcgtcaaaggaggagctcttttcacggccgcttcacccttatacgaaagcgctgttatcagccgtgcctgttcctgatcccggagcgaaaagggagcggataattttaaagggtgatataccaagcccctctgatccgccttcaggctgtaaattccgaacgagatgtccggcagccaagaagatatgtgctgagaaaagtccggcgctgtcagaaaaagggtttcatcattttgcggcatgccacttcgtgtaattgagaaaaaaacggttttattgataatgaacataaaaaacctgccgggcagaccggcaggttttttgatgttattttggtgacggcagtccgagtccttcggcaacgcgtctgccgtattcaggatcagccttgtagaagtggccgatctggcgcagcttaatttcttctttttccacaggtttcatcgcactgacgatattggcgacaaggcgcgcgcgctcttcctcgctcatcaggcggtacaggtcgccggcttgtgtgtaatgatcatgatgattatagcttacactgtcagcgaaacctgatacagggtatgccgcctgtttatcttcaggtgactctttcgggccgccgaagctgttaggctcgtaatagacggagcggccgccgttatcatcaaaacgcatttgtccgtcacgctgatagtttttcacttcattgcgggaacggttgatcggcagcgcctgatggttcgcgccgacacggtagcgatgcgcgtcatggtatgcgaacaaccggccttgaagcattttgtcaggtgagacgtcgacgccgggcactaatgtgccgggagagaacgtcgcctgttctacttccgcaaagtaattttccggattgcggttcagaaccatgcggccgacttcgatcagcggatagtctttttgagaccatacttttgtgacgtcaaacggatcaaagcgatatgtgtttgcatcttctaacggcatgatttgaacatataatttccatgcggggaaatcgccgttttcaatcgcattgaacaaatcttccgtatggtaatcgggattttcgcccgcgatttttgcggctgtattaacatcaaggtttttcacgccttgctctgttttaaagtgatatttaatccagacgccttcgcctttatcatttgtccatttaaatgtatggcttccgaatccgtgcatatggcgaagagtcgccggaatgccccggtctgacatcagaatggttacctggtgcagggattcgggtgacaaagaccagaaatcccaaacggccgtcggatttttcagatgtgttctcggatctcttttttgtgtatggataaagtcagggaacttgatggcatcgcggatgaagaacacgggtgtattgtttccgacgatatcgtagtttccttcttctgtataaaatttaacggcaaatccgcgcgggtcgcgcactgtgtcactagagcccagttcgcccgcaacggttgagaaacggatgaaaagcggcgtgcgtttaccgacttctgacagaaatgcggctttcgtatattttgtaacgtcatttgtgacttcaaaataaccgtgtgcgcccgcgccttttgcgtgaacgacacgctccggaacgcgttctctgttaaagtgcgccaatttctcaagcagatggacgtcttgtattaaagcaggaccgcgatcgccggccgtcattgagttttggttatctccgacaggagcgccccagctggttgtcagtttatttgaactcatgtgatcacctctttaaatttataagaacataatatcacctatcagtaaaaagtcaatattattttataatgattataaaataattatttttattatcgaaaagaaggtatgggtttaataacacacttgactgacgggaataatgggtttaatatgagaaaaaatagaaaccgctgacttggacacaagaggctcttattcttcactggataagggcctttttttattgtcaggcggtaagggaggcggcgattgtatgcttttccggcagcattttaaacctgtcgatattcacggtcatctgccgtacagccttaatttcggcaaaaacgataagacattttccgattataaccgggagcggtcggaaagaatgaatctcacttgggattttcctgatccgcatgatgttgatggcgatgacggcgaaatcgctttgatgacaagatgggagaaagaattagataagtacggcattgacgtgctgaattttttaacagcagagagcaatgaccggatggcggcgtttattcaagccaatcccgcgaggtttaccggatttgcatatcatcctttggaacaaaaggatgcgtatgaggagctgaaaagagcggttgaagagctcggtctgaaaggatataaactgttcgggccgctgacagacatcgagtttcatgatccgtcgctgaaaaagctgtggacgtatctggctgacaaaagactgcctgtattaattcacttcggacttttagggagagcggggggcattgtcagccatcgcaacatcaacccgctctccatctatcgcgtcgcgagagagtatgctgatataccgttcatcattccgcatttcggcgccggatattatcaggaactgctgcagctgtgctggagctgcccgaatgtgtatattgacacgtccggctcaaatcagtggatgaggtggatgccgtaccggcttgatttggaaattctgtttcgaaagacatctgaattaatcggtgctgaacggatcatcttcgggacggattcgaacggatttccgagaggatatgtatacagatatcttcaggagcaggtgaggacctgccgggaaatcaatatgcgggaagaagatatagaaaacattttcggcaacaacgcgcagacattattgaaaatcgcccggaaagaaaaggaagtaaatacgtgatacagccgatgcgctctttggcaggtttatgccggaaggcgcatttttaattcatacaaaaaacagttgacaagtcggaataatttgaattaacatgatattcaaatttaaaaacaaacgggttgccgatcggaccgccgaaggctcccatctctgcaagcaatcggagatgggggcctttttgtttttcgatcgcatgcggcagaaagagaggggaagacagatggctgtaaccatcagcatacaagaaaaagcttttgagcatgaaggccggaaaacgccggtgctgaatgatattgagctgtcaattgcatcgggagaatttttgactgtcatcggaccgagcggatgcggcaaaagcacgcttttaaaattgattgccggtcttgataccgattataaaggctctgtcgcaataaacggccgcaatgtgtcgggaccgggcatccggcagggatttatctttcaggagcaccggctgtttccctggctgacggtaaaacaaaacatcgctgccgatctcaatatgaacgacccggccgttcggaaaaaagtggatgatctgattgaggttgtcaggctgcagggagcggagaacgcttatccgcgcgaattatccggcggcatgtcgcagcgggttgccatcgccagagcccttttgcgtgagccggaggtgctgcttttagatgaaccgttcggggcgcttgacgcttttacgagaaaacatttgcaggatgtgctgcttgatatatggcgcgagaaaaaaacgacgatgattcttgtcacgcatgatattgatgaatccgtctatttaggcgataagctggcgatcctcagggcaaagcccggccggctgcacagcctgatgccgattcagcttccgcatccgcgcaatcggacgtcagcggattttcaggccgtccggcagaaggtgctttctgaatttgagaaaacggaagacctccggtttgcggatgggtccggaatatagaagggacgaagcgaagtgaaaaaaatcatcattcttttagccgcagcagtcatgatgtcagccggatgcagtgcagacgggacaggagggggcgggaaaacggtgaaagaaatccggatcggcatccagcagagtttaagcccgcttctcattgccaaggaaaaaggctggtttgaagaggccttcaaaaaagacggaataaaagtaaaatgggtcgaattccaaagcggtcctccgcaatttgaaggtcttgccgccgataagcttgatttttcccaggtcggcaattcaccggtcatttccggtcaggcggcgggaattgattttaaagagatcgggctgtctcaggacgggttaaaggcaaacggcattctcgtaaacaagggcagcgggattcagagcctgaaagaattgaaaggtaaaaaaatcgccgtagccaaaggcagcagcggctttgattttctctataaagctttagataaagcggggctttccgccgatgacgtcaccatcatccagcttcagcccgatgaggcggtttccgcttttgaaaacaaatcagttgacgcatggtccatttgggagccgtatttgtcgattgaaacgctgcagcacggggcggaaatattggcgaacggagaaagcacagatttatattctcccggtttcacattagtcagaacgggattttccaaagaacacccggatgaggttgtccgttttctgaaagtgttcaataaagcagttacatggcaaaaggaacacaaagatgaagccgtctccttatatgcgaaaatcaaacatcttgatccgaaagtcgtcagaaacgtgcttaacaatactgagcctctcaatgaaccgatcgatgatgatattgtcaaagcccagcaggaaaccgctgattttcaatatcgaacaaaagcgattcataagaaaattcatgtaaaagacgttgtcgacaattcatttattaaaaaagcgcttgaaacgggggatggcaagtaatgaaagcagaagcatcaacggctgccggcgcaataagccaatcagaaaagaaagctctggcaagatcccggaagtattcataccaatggatgaaagggattgtactcccggctgcggtcatcgcagtatggcagtttatcgcaagtctgggcatcgtctcggccgcggtgctctcgtcgcctgtcgtcatcttgcagacgtttcaggaacttcttctttcaggtgagctttggggtcatttagagatcagtttataccgggcggctgccggatttctgcttggcgcgggcctcggacttgtttccgggctgctggtcggtttttcaaagcggacggaagcataccttgatccgtctctgcaaatgctcaggacggttccgcacttggccgtgactcctctgttcattttgtggttcggatttgatgagacatctaaaattctgctgatcgcattgggggctttttttcccgtatacattaatacgtttctcggaatccgcagtgtggacgcgaagctgtttgacgtcgcgcgggtgctggaatttaattggtatcagcagatgacgaaattaattcttccggcatctctcccgaatatcctgctcggcatcaggctctccctaggcattgcgtggctcggtctcgtggtggcggaactgatgggatcgagcgagggcgtcggttatatgattatggatgccagacaattttcacagacaaataaggtgtttgtcggcattatcatttttgcggctgtcggcaagctgacagatgcattggtcagaatgctcgaacggaaactattaaaatggcggaacagttatgaagggtaacctattaaaaaaggagagattcatatggagattctttggtttattccgacgcatggtgacggccggtatttagggacgcaaacgggagggagaacggcggatcatctttattttaagcaagtggcacaggcggcggacagactcgggtatacgggggttctgctgccgacggggagatcatgcgaagacccgtggctgacggctgccgctttagcgggggaaacgagtgacttgaaatttttagtggcggtccggccgggactgatgcagccgtctgtcgccgcgagaatggcgtcgacaatggaccggctgtcagacggccgtttgctcgtaaatgtcgtagcgggcggagatccttatgaactggcgggagacggcatgtttatcagccacgatgaacgttataaggcgactgaagaatttttaaccgtctggcgcggactcatgcggggcgaaacggtgacatatgaaggggaccatatcaaggtggaaaacagcaacctcctgttcccgccaaaacagtctccgcatccgccattatatttcggcggttcatcacaggcgggaattgaggctgctgcgaaacatacagatgtctatttaacatggggagagccgccggagcaggtaaaagaaaagattgaaaccgttaaaaaacaggctgccaaggaaggaaggacgatgcgttttggcatcagacttcacgtgattgtccgggagactgaggaagaggcatgggaagcggctgaacgattaatcagccacttagacgaagagacaattgcgaaagcgcaggctgcgctccggcgcgctgattcatcgggacaaaaacggatggccgatcttcataacggtgaccgctcgaagcttgagatcagcccgaatctctgggccggcatcggactggtcagaggcggagcgggcacggcgcttgtcggtgatccgcagactgtcgctgatcgaattttagagtatcaggcactcggcattgagtcgtttatcttttcaggctatccgcatctggaagaagcttattatctggctgaactcgtgtttccgcttctgccgtttcagaatgaacggactaacaagcttgagcgcagagtgggtgaagcaatgggaaacgaccattttgcaagaggaaataaagcgacagtctgatgacgtcgcaaggcggatcattgacggcgggcgctttctgcggattcatttccggggaaatgccggcagtgaaggcgggtattcacccgcctttttaagcgcttagcttgcacgatgctcatctggatgatatgatacaaaacgtaattattacgatttgttaggagtgctgaaatggcaaaaaaatcaaaagtaatcaaagagctcaagcggcagaagcttgttgaacaatatgcggacatccgaagagaattaaaggcaaaaggcgactgggaagcgctgagcaaactgccgcgtgattctgctccggccaggcttcataaccgctgtacggtgacggggcggccccgcggatatatgagaaaatttaaactgtccagaatcgcattcagggagctggcccataaaggccgggttcccggggtgaaaaaagcgagctggtaacataaaaaactccggatctgtcatgaaccggagtttttgccgtgcttatgaaaagtgaaaacataagccaaatgctgaatcatcatcagaatgaaaatcaaaagaatcggaaaaaaaggtagatgcggctgaatcagcggataaaacaaaagcagaacggctgcggccggcaatgagaagtaaacggcgatatacgaggaacggcaagctttagccgtcatcattcgttctctttcatcctgttcctcaaattcatcgggcactagcctatgctttttgccgtttcgttttttcttttcggcatagatatacaatgcggcacaaacggtaaacagcagaaacggagtgatattcagctcaaatgcaccgctcccctccgtttggaaaaactgagcgatccgcggcgccgcttccataaaggaaataagcgtccagcaggccaatccgtagagtgcaaggtgaaaacacgcttttcttttcaaactcattttttctcctcctccagccagaaaacttcctccatcggcagggagaaagcccggcagatgttaagcgccaataagagtgaaggcacataatctcctttttcaatcgctgcaatcgtctgtctggtggctccggcttcttttccgagcgtttcctgagaatagccgaatctggctctcagctcttttactttatttttcatcatcagggcgtacctcaagttttcttcttttttatattgtatgagattcttaacaaaatgtaaacctaacttaacatgtggacgaaaaaagaatttttttcgacaaattttttaacattcccttgacgaaaaaaaaatatacatgtaatattagaaacatcaaatcggtactgacaaaaaactttgatgcgggtgtagtttagtggtaaaacctcagccttccaagctgatgtcgtgagttcgattctcatcacccgctccatacatacgttattaacgcagtgtttcgtttctctgataaacgaagtattgcgtttttttatgtgaaaaaagacacgaaggcgtgtctttttatgaaagccaagagacggtatgcgtgcctccgtgaatttgttcaaacattttggttaaagatgatagcagctcatccgccgcgtcggcatgaaatgaaggcgggaaaaagatcagctgcagcattttctttgtgccgattgttacagggcgggtgttgatatgtccggtaaggccgccgaaaatgccgccagagtcggagaaagcaagtacgtgttctttttctccgattgtaatcgaaatcggttcatctatttctgcggcgtcatacgccatgataggcaatgaatatttcaaggagaaaaaaagtatggtatcatgggctgaattcacactttcaatgaatcgttcccgggaaatatcgccgagcataagctccatcggcgttttttgtcctgaaaaggcgggactgagctgttccattatacacgcccactctttaacaaaaggctgctcatctataccgccgtcagcataatcaaagtaaagagattcttgaaataaacggaggcggcctttcagcatttgcggagcaggcccgacttcgatctgttcatataagacggctgccgctttgatccccggcacccgttcagcaataagtggatctaaactgatgttcaagtgtgttcactccatttcgggatgataaaactctattatacccgtgcgggagcctgatcacaaagaaaggaggctgtgcaaaaaatgaatattcataaactgaaagaggaattaatcgaatacgccaaaagcatcggagttgacaaaatcgggtttacaacggctgatacgttcgacagtctgcgggaccggctgattcttcaggaatcactcggctatttatccggttttgaagagccggatattgaaaaacgggttactccgtctttgcttctcccgaaagccaaatcaatcgtcgccatcgcccttgcttatccttccaaaatgaaagatgcgccgaggagcacgagggacgggcggcgcggcattttttgcagagcttcctgggggaaggattatcatgatgtgctgcgggaaaagcttgatctgctggagaattttctccaaagcaaacatgaggatatccgcacaaagtcaatggtggatacaggagaattgtccgacagggccgtggctgaacgggcgggaatcggcttcagcgccaaaaactgcatgatcaccacgcctgaatacggttcttacgtctatctggctgaaatgatcaccaatctgccctttgaaccggatgtgccgattgaagatatgtgcggtacgtgcacaaaatgtctagacgcgtgtccgaccggcgccctcgtcaatcccggacagcttaacgcccagcgctgtatttcgttcctgacccagacaaagggatttttgccggatgagttccgcacgaaaatcggaaaccgtctgtatggctgtgacacgtgccagacggtctgtccgattaataaggggaaagattttcatcttcatccgcagatggagcctgatccggaaatcgcaaagccgctgttaaagccgcttttgaccataagcaaccgcgaattcaaagaaaaattcggacatgtatcgggatcatggcgcggcaagaagccgatacagcggaatgcgattttagctttggctcattttaaagatgcctcgtctcttccggaattaacggccttgatgcaccaagatccgcgccccgtcatcaggggtacggccgcctgggccatcgggaaaatcggtgatcctgattatgcggaggaattagaaaaagcgcttcaaaaggagcaggatgaagacgccatacgggaaattgaaaagggactggagctgttatcggtttctgagaagactaaaaccggccggtcctgacatatgtatagagaaaaagcacttggccggagttcaagtgttttttctttataaaatcgtatggtgggtggagcgcttgaagcatattattgaagatttagcggaggcccggcttcattatttaatcaacggaactgagatgaggcagaatgggcaggccggcgatcttgaggtcctgacgagaaaaaaagagctgtttgaaaaacggaaagttgatatcgtgaaagcgaaggcaaaagccgtcattgtcaaaagcagtcttgaggacgacggcacgttatgtgtcatgtacacgattcatttcgaatatttgtgcaaggagcatgacggacacctttacttagaagagcagattgaggaacggactgcatttctctatgatgagcttttgattaaagaccgggaagtaaagaaaaaaccggctggattttctgacggaaacagcgtaattgaatatgagcggagtgaacgggaagatttcgggcgggcgtttcaatacgaccgtctggctgccgtgcagtacgcggagaagttttggaataaacgaaatcccgcttataaaaatttcagcgataattgcaccaattttatttcccaatgtttacatgccggaaaagcaccgatgcgggggcatccgaacagaggctcaggctggtggatgaaggcaagctcgtggagctacagctggacggtcgcgcattcgatgaagatgtatctggcccaatccaaggcagggcttcgcgcagtgcaagtatcaagagctgaagaactgatgcccggagatatcatttgctatgattttgaaggagacggccgttttaatcatacggcgatcgtggtcgcaaaagataaaagcaatatgccgctcgtcaatgcccaaacgtatgacagcaggatgagatattggtcatatgaggattcaacggcgtatactccttccatcagatatgcgttttttcatattacggatgatacgacaaaagagtaattaatgatataatggtgggcggaataaaaaacagaggtgaacatcgtggcattacatgtcgttttatatcaacccgaaatcccggccaatacgggaaatatcgcacgtacttgtgcggcaacagacacaacgcttcatttgatccgcccgctcggattctcaaccgatgataaaatgctgaagcgcgccggactcgattattgggagttcgtcaacgtcgtatatcatgattcattggaagagttatttgaagcatatgaaaacggaaagtttttcttcattacaaaattcggtcaaaagccgcacacatcatttgattactcaaatacggaggaagactttttcttcgtattcggcagagaaacgagcggacttccgaaagaattgatcgaaaacaatatggaccgctgcctgcgtctgccgatgaccgagcatgtgagatcattaaatctgtccaacacggccgcgattcttgtatatgaagcgctgcgccagcaaaattacagagatttgacgtgagaaaaaacgcccgcatccgggcgtttttttattgaataaaaaagacgggcagcagcggtttacggcatttttatatttccgggcttaacaacgtaacagtgttatgttacaatacgttcatcgaaggagctggattcatggaggaacaactgatttctaaaaaagaattgctggaagaaacatcaatttcatacgggcagctgtaccggtggaaacggaaaaatttaattcctgaagaatggtttatccgaaaatcgacgtttacaggccaggaaacattttttccgagagcggaaatattaaaacgcatctcaaaaatacaggaaatgaaagaaaatctgtctctggatgaaatgagagaaatgctgtctccgcaaatgactgatgtcaatataacgtctgcggaactgcttcaaaagggactgatttcaaaagccgcgctgcaagtttatggcgaagacggcgtgacattcacgtcccgcgcgctgctgtctttatatgtgcttgaagggcttttgcaatcgggcaatatcagccttgaggaaggaaaattggcggcgggggtgctgaagacgtatgaggcttccgagctgaaagcgaatacggagcttgtcatgctccgaaagctcggcgtaacgacgtgcttcatcgcagacgcggaacatattttatttgaaccgactgtcaaagtggttgaacgggtggcgcttgctgcggcatcggaagaattaaaaacgaaatggatgcaggaggaccatcaatggaagtaacagataaattaatcattaacggttcgggaagttcaaaaggaggccgttttcatacagtggagatcaacgggagcggcacggtgtcaggtgatgtggagtgcacgagccttttgtttaacggcagcggaaaaacagacggacatgtcaagacgcaaacactgacaatcagcggttcggggaaaatttccggcagtgccgaagctgaatccatccgtatcaacggaacgggtgtcattaaaggtgatgtcaaaacggagcggctgaacgtcgcgggattttcatctttcggcggcggtgtgaaagctgatgatattttcatatccgggaaagccgggattgaaggtgattgcgagacagagacattccgttcggaaggcaaatgcaagatcggcggcctgctgaatgccgatgaagtcagtatgaagctggctgcgggagaaagtcatgtgaaagaaatcggctgccgccatttgaaagtgatgagcagaaagagcgtgcttacgcgttttaagctgatgccggccccggtgctgacagcagagctgattgagggtgacatcattgaattggcggacacgaacgcgaagacagtccgcggaaatcatgtgcggatcggcgcgggctgcaccattgggacggtggaatacagcggcgattttacatgtgatcctaccgctttggttaacaaagtcgtgaaacgataggaggagctgcaatggaaacgacaaaaaaattgagtcatttaaaaatgtacggagccggacacgcttccggcggttcctaccaaaatgtaagcattaaaggggaaggaactgtcggcgaaggacttcaaagcgaacgctgccggatattcggcacgggactttttctcggagatgccgagatcagcaggctgaaaattttcggagagcatgaagttgcaggagatttatcagcacattcagcaaatgtgatcggcacattgaaagtcggcggctccatgcgttttgccaggatgaggctgaagggacttgctgaaattggcggcggggccgcgggagaacagtgtcatataaaaggcagtctcaccgtcggcggcgattgcgagacggagctgcttcatgtaacaggatgtatcaatgtggcgggattgttaaacgcaggggacgtaaacatccatttgcgttatgaccgaagccgcgtgaaagaaatcggcggcacatcgattaccgtcagacggaaacccggttttcttaaacggaaagccggcatgctttctgctgaattgatcgaaggagacgcaatttacctcgaatccacggaagcggacatcgtcagagggaagcgtgtggaaatcggcccgggctgcaaaatcggaaaaatcgagtatcaaacaagctgtaagtctcatgaaaaatcaactgtccaagaacatattcaaatatgaaacattgttatgttgtacaggaaagggtgctcttcataaagagcacccttttgccgttatttgttttcaggtttgctgtcgtaacccgcagtaaaaatggatactaaaaaagtgagaatgaccccaagtaaaatgatcgttttcatcatgtctcctcctctttgcttttccatttgatgtccgagtctggatgaaactgtatttctttcattatgaacggtgcaccggacccttgtcaatgacggccttataacgtctttatttttaagaaacgaaaagcatgtattatcacgtcaccgcatagattgtaacaaagtaccttatttctagtgcattaaccatgatagaggaggttcttatggatatattaaagaaaattgaaaagtacagagaggaagagcagcgtctcaaatgggaagggacgttcgctgattatttggagatcataaaagaaaatccattggtcgcgcagtctgctcattctcgcgtttttaatatgataaaagacagcggaatcgaggaggatgacgggaaaaagacatacagctttttctcgagggagctgttcggccttgaggaatctctggaacggctcgtggaggaatactttcacccggctgccaagcggctcgatgtaagaaaacggattttactattgatgggacctgtcagcggcggaaagtcaactcttgtcaccatgctgaaaaaagggcttgaagcctactcattgacagataacggcgctgtttacgccattaaaggctgcccgatgcatgaagatcctctccatctcattccccatcatctgcgcgacgacttctacagagaatacggcatcagaattgagggcagcctttctccgcttaatgtcatgcggcttgaagaagaatacggcggcagaattgaggatgttaaagttgaacgtatattcttctcggaggataaacgtaccggaatcggaaccttcagcccgtctgacccgaaatcacaggatatcgccgatttgacggggagcattgatttttctacgattgccgaatacggttcggaatcagatccgcgcgcttatcggtttgacggtgaattaaataaagcgaaccgcggaatgatggaatttcaggaaatgctgaaatgcgatgaaaaatttctgtggcaccttctgtcactcacgcaggaagggaatttcaaagccggacggtttgcgctcatctcagccgacgaattggttgttgcgcatacgaacgaaacggagtaccgctcgtttattgccaataagaaaaacgaagcccttcactccaggatcatcgtgatgcctgttccttataatttaaaggtgtcagaggaagaacggatttatgaaaaaatgatttctgaaagtgatgtttctgacgtacacatcgcccccatacattaaaagtggccgcgatgttttctattttgacccggctgaaggaaccgaaccgctctgatattgatctcgtcaaaaaaatgaggctctatgacggagaaagcgttgaaggttacaattccgttgatctggaggatatgaagaaggaattccatgatgaaggaatgagcggtatcgacccgcgctatgtcatcaaccgcatttcctcaacgattatcagaaaaaatatggaatccatcaattcgcttgacgtgctgcgttccttaaaagaaggactcgaccagcatccgtccatctccgccgaggacaaagagcggtatatgaattttatttccgccgccaggaaagagtacgatgacatcgccaaaaaggaagtgcagaaggcgttcgtttattcatatgaagaatccgcgaaaactctcatggacaattatttagataatgtggaagcgtactgcaataaaaataagcttcgcgatccgctgacgggtgaagaaatgaatcctgacgaaaaactgatgagatccattgaagagcagatcggcatttcagaaaacgccaaaaaagcgttccgcgaagaaatcttaatccgcatatccgcctatgcaagaaaaggaaaacgctttgactataattcgcacgaaagactccgcgaagcgattcagaaaaagctgttcgcagacttaaaagatgtagtgaaaattacgacctccaccaaaacgccggatgaacagcagcttaaaaaggtcaatgaggtagtggcaaggttaatagatgaacacggctataattcgactagcgctaatgaactgctgaagtatgtcggaagcttgttaaaccgctgatatttgatttcattgagaggcccgtctgtaaaaggacgggttcttttgtctgtttttcgcaattgtttgtcaattggagagtccggccggcataagataaaaataaatcttttcgccggacttgtttcataaacaggaccaagccggaatacacatgtaaaacgaccataacggttaaggaggggaattcatgtcccgtaatgacagcggaaattttttgatttcagaggaagactggtccctccatcgcaaaggctttgacgaccagcagcgccaccaaaagaaagtgcaggaagcgataaaaaacaaccttccggaccttgtcactgaggaaagcattattatgtccaacggaaaagatgttgtgaaaatcccgattcgttcgcttgatgaatataaaatccgttataactatgataaaaataaacatgtcggccaaggcgacggcgacagcgaagtcggcgatgtcgtcgcaagagacggcgcagataaaaagcagggcgccggaaaaggccagggagcaggcgatcaggcaggcgaggattattatgaagcggaagtttcattgatggatctggaagaagcgctgtttcaggaattagaactgccgaatctgcagcaaaaggaaagggacaatatcgtccataccgatatcgagttcaatgatatccggaaaaccgggctgacagggaatatcgataagaaaaggacgatgctgtcggcctataaacgaaacgccatgacaggcaagccgtcgttttaccctatttatccggaagatctgaaatacaaaacatggaatgatgtgacgaagccggaatcgaaagctgtcgttttagccatgatggatacaagcggttcgatgggcgtatgggaaaagtatatggcgaggagtttctttttttggatgacacgatttttacggacaaagtatgaaacggttgatatcgaatttatcgcccaccatacggaagcgaaggttgtgtcggaagaagattttttctcgaaaggcgagagcggaggcaccatctgttcctccgtttaccggaagtctcttgaattaattgatgaaaaatatgaccccgcccgctacaacatctatccgtttcatttttcagacggagataacctgacttcggataacgcccggtgcgtaaagctcgtcaatgacatcatgaaaaaatcgaatctgttctgttacggtgaggtcaatcaatataacaggcattccaccctcatgtccgcctataaaaatgtcaaagatgataaatttaaatactacatcctgaaacagaaatcggacgtatttcaagcgctgaaaagcttttttaaaaatgaggaagccggtataagcaaagcatcgtattaaatataaagccgagtgaagaatcgtgcggccgcggttcttcacccggcttttttaaattaaaaataaagagaaaaaacggcataaaaaaaatccttaaaaaatgaaacttttctctttacaaaccttctttcatttattaatattttatcttgtgaactattattaagggaatgaggtgaaaatacggtgattgaatcagagctcgctttgctcagttttgaacaactgtttgatacttccagatcgatttacaaaaagcagaaaatgattctggagacagtgcttgaaccttttgatattacagtgctgcagtatctgctgatgttcaaaatacataagagcaaaagcacgcagctttcaaggctggctttgtcgcttgatctgaaaccggcgtctgtcacgagaatgaccgatattctgtataagcgccgcctaatggttcggagcgactatcacgacgaccggcgtgttgttatgattcagttaaccgaagagggggaagaacttctaaagaaagctgctgttcaatatgccgaaaaagcggcggtcttataccggcagctcaataccgctgaactgcagtacctgcgcaagcttgcggaaagtttaacgaagcttgcaaacggctgtgcagtgaaaaacggaaaataaaaaaatccccacatatttttatcatcattccacaaaatgatagaggaagaaacgaaaggagaaaacaaaatgaacagaggacgtttaattctgaccaacattatcggtttgattgttgttcttgcaattataggcggaggtgcttactactattatcaaagcacacactatgtaaaaaccgatgaagcgaaagttgccggcgacatggctgctatcacagctcctgctgcgggtaaagtaactgactggaaccttgatgaggggaaagaagtaagcaaaaacgacgtggttgcaaaaattaaaggacagcaaaatgctgacgtaaaagccatcatggatggaacaatcgtgaaaaacgaagtgaaaaacggccaaatggtgcaagccggtacgacaattgcccaggaaattgacatgaaacacctttacatcactgcaaacattaaagaaacagacattagagacattgaagtaggaaacaaagtagacgtaattgttgacggcgatcctaatacaacatttgacggaacagtagaagaaatcggttatgcgacaaattcaacatttgatatgctgccttcttcaaactcaagcggcaactacactaaagtaacgcaaaaagttcctgttaaaatttcactcagcaacccatctgacaaggtgcttcctggtatgaacgcatctgtaaaaatctctgaataatacagatcagtcatcaaaccatgaagggaggttgtcttaggtggctaaatcagataatcaagtaaaaagtcctaaaacattgcttattgtgcttatggccgggttattcctggcgatcttgaaccaaacgcttcttaacgtggcgatgccgcacttaatgaccgagttcggtgtgagtgcgacgacgattcagtggcttacgaccggatacatgctggtcaacggtgttttgattccgttatctgcgttcttaatcacccggttcggacagagaagcctctttctcgtagccatgttctgttttacagcgggaacgttagtctgcggaatcgcgcctaacttctcaaccatgctgatcggccggttaattcaggcggtcggcggcggtatcctgcagccgctggtcatgacaaccattctgcttatcttcccgcctgaaagcagggggaaaggaatggggattttcggtcttgcgatgatgtttgctccggcggtcggaccgactctatccggctggatcatcgagcattacacatggcgcattatgttctacggccttgttccgatcggggcaatcgttattatcatagcgtttttcctctttaagaacttggtggaaccgcaaaaaatcaaactcgacagcttgggtgcgattctatctattgtcggattcgcctcattgctttacggagtcagtgaagcgggcagcgacggctggggagatccgatcgtgctgtctaccgtcattgtcggtgtcatcgcgattgccgcgtttgtcattcagcaattgcgctctgaaaaaccgatgcttgacttccgggtatttaaatatgatattttctcactttccagtgtcattaatatcattattaccgttgcgctttacacaggaatgttcctgcttccgatttacctgcagaacttagtcggctttacggcgctgcaatcgggtctcttgctattgccgggcgcgattgtcatgctgatcatgtcgccgatttccggtattctgtttgacaaaattggtccgagaccgcttgcgattatcgggctggtcatcacggtcgcaacgacattccagtacacaaaattgacaattgacacaccttacacgcacatcatgcttgtctatgccatccgcgcattcggtatgtcactgttaatgatgcctgttatgacagccggaatgaaccagcttccggcacggttgaacagccacggcacggcgatgagcaacacgctccgccagatcagcggatcaatcggaacaagtttgatcacaacgatttatacgaaccgtacgacaatgcattattcgcagattgcggataaaacaagcacggctgatccaagcttcatgcagtcgttccaaagcgcggtttcgaatttaatggtcaacatgaacatgtcgcttgatgcggcgaaacaaaccgtttattcatatctctacaaaacagcttcactcaattccaacgttatggggattaatgacgcgtttatgtgggcgacgatctttgcggttatcggcgtagtcctgagtctgttcttgcgtgacgtgcggaaagacaaacagcgggcgaagaaaaaagaggagctgtcattgcttccggcccctaaagaagtgaaggaatcttaatcatctgaatgggaggtttcctgaatgaaaatttacgtagtgtacgatagtgaaggcgaacacacaaaacatcttgctgaagccattgccgagggcgcacgagaaaacgctgaggctgaagtcctgatcgaccatgtcgatcaagcagacatccgcaagctgaaagacatggatgccattatctggggatgcccgggacactttggcaccatcagttcaggcttaaaagcgtggatcgacagactcggctatctgtgggctgaaggcgagctgattgataaagtcggcgctgtattctgtacgacggcgacaacacacggcggattagaaatgaccatgcacaatctgatcactcctatgtttcaccaaggcatgattgttgtcggtcttcccggcaacgttcctgaaaacgcgctgtacggctcttactacggcgcgggcgtcacatgcccggttgacagcgatgtgctgatgacggaagaaggccttcaattaggccgtgcgcttggcagacgtgtcagccaggtcactggtaatctaactgccggacgacagtaaggagagggttatatggccattattatagcggttattgctgctgtcattgtgattgcacttcttatcaccttcaatgtccgcagcacttctgcaggacaggatgtcaaagaagaaaagagagaagcgatcggcactacagccgaacagccggaaaagcatgatccggccgaggagcgctcagccgagcatgctcccgtcgttgtaaaatctgaatctccccgtgagaaaaagaatacaatgggcgatgatgtgtaccgtcaggcgcttcagaagtttaagacttctgagacggatcaggaaccaaacgatcctgatagcggcggcaaaatgcaggatagcagctatcgtgatgcgctgctctccttaaaaaacaaaaagaagtaattgaaaaggcaaatccgcgtaagagcggatttgtcttttttttattgaagatattgtaatacgtgatgatctagtgtactatgttactcatacacttgatccgaatggagagagaaagaatgacatcgtttttaggtttgctgaaaaaagatgcgaaagtttcatggatttggctcgcggtgtggctttgcggcatgatttgctgggcgttttcagcccacgtcatcgctgcccgtcagaaagaaccgctcgtcattttcggcttttttacggcaatggggttttttcaatttcttgtagcgccgctttttatgtattatcaccttcataaagaaggaaaaaaccagctgtggctttacaatccgaatgggggattttatctgctggcttccaagctgacggcctcactgctgtatcagttgatcgggcagctggcgctgacgggttacggcatttggatgtaccggatgctttctgcaaaaggagtgctggaacacaccattcccctggccggcacattaaccgggctgaatgcttacctgctgatcagttcagcgtacttatctgtgatcgtggccgtattttggactgtttttcactcattaaaacattttcccgtcctccgttgggggatctgcatcgtgcttgcgtttgtctggacctatattgacgataaaatcattacgcctttcacttcatctcaacatgatttatggccggtaaaagtgtatgcgaattttcattttcattatacgaaattgtccggatggacgatggagctgaaagccgtccacatttcgcttttcagctttctggcagtgatcgtgcttgcagcgctctgtctcgcgctggcctctatactgctgaatcgaaaggttgaggtgtaatgatggagaatgaatttcagtcatccaagcccatttatctgcagattgccgatcgtatatattaccggctgatccgaagtgagctttcaccgggggacaaactgccgtccgtaagggagatggccgtacagatgaaagtgaatccgaacacgatacaaagaacgtacagtgaaatggaaaggctggggatcgtggagacgagaagaggacagggaacctttatagcggaaagatccgatctgaaagcagagctgaaagacaggctgacaaaagacgttttcaaacgctttattcaggaaatggcggagctggggttatctcctgaggaaatgctcgaggggatcaaacaatatgcggaggaagcaaacgatgaatcttgattttgaacgcgtaacaaaaaaatacggccgcaggatcgcggtcagcgatgtatcattttcattgtctccgggtaaaatctacggaattttagggccgaacggaagcggtaaatcaacaacgcttaaaatgcttgcagggcttgcttttccgacatcgggcgccgtccggatgggagagtgcaaagtaagcaggaacatgctgtttcgtacggcttatttaaccgaacatgatatgttttccgcccggacgaccgtcggtgatatgctcacgttttatcattcgcaattcccggattttcagctggaaaaagcacataacctattagcggaaatgaatctttcagcgaagcagaagttaaaagagctgtccaaaggcagccggggcaggctgaaaatcgttttggccctgtcgagaaaagcatcggtcattctgctggatgagccgttttcaggtcttgatccggcggtcagggagtcgattgtcaacagtctcgtatcttatattgattttgacagtcagatcgtcgtcatcgccacgcatgagatcggcgagattgagacgctgttagacgaagtgatggttttcataaaagggaaaatcgctgaacggcgcgaggtcgaagaaattcgggaacaggaaggaatgtccgtgctgcaatggtatagaaacgtcatgcaggcgcacgaaatagaagggggattctaattggaaacggtattagaactgcaacaggtaaagaaaacgataaaaggacgaacgattattcatgatctgagcttctccgtccgggcgggcgaagtgtttggatttttagggccgaacggagcggggaaaaccactacgatcagaatgatggtcggattaatgaaactgtctaagggagacatcgtaatctgcggggaatccattacgaaaaactatgcaaaagcggtcaggcacgtcggagccatcgtggaaaacccggagctgtacaaattcctgagcggctataaaaatttacagcagtacgcaaggatggtaaaaggcgttacgaaagaaaaaatagatgaggtcatcgagctcgtcgggttgcaggacagaatacatgacaaagtaaaaacctactctctcggaatgagacagcgtctcggcctcgcccaaagcctgctgcataatcctaaggtgctgattctggatgagccgacaaacggcctcgatcccgccggcatcagagaaatcagggaccatctgaaaaagctgacacgtgaaaaaggaatggctgtcatcgtctcaagccatcttctgtcagaaatggagctaatgtgcgatcgaatcggcattctgcaaaaaggagagcttgtcgatattcaaaaagtaagggatgaaggaaaagaggataaagatacatacttcttccatattgaacaaagagaagaggctcttgccgttttgagtcagtttgactgtgtgaagaagacaaacggcattgagatccagctgtccaaacaggaagtgcctgatgtgatatcactgctcgtccgtgaaaacatccgcttatatgaagtgaaaatcatgacaaaatctttggaagaccgtttcttggaaattaccggcgggacgaaagaggaggttcaatatgtttaagctgatctataatgaatggattaaaattttcagccgcgtcggcacgtgggctatgattgtgattttaggcgtttcgatgatcggttttgcgcttctgtcaaaccatttcacctcgaacgaagccaatccgaattggaaacaggagctccaggctgaaaacaaagaaatgaaacagcagatgaaggaaaccggaaatcagacgctcattgataacctgaaacagaatgtcgcgataaatcaataccgtatggatcataacatccccgaggatacagggtacacagtgtggtcatacgtatctgattcttcgatgatgactgttttgaccgggctgtttacgattatcattgccgcaggcatcgtggcgaatgagttcaactgggggacgatcaagctgctggccatccgtccgctcagccgttttcagattttgctttctaaatatatgacagtgctgctgttcggactgctgatgcttgtgattttatttgccggctccgctctgttgggattggtctttttcggtacaggcggagatactgcggctgatgttcatctcgtatacaaagacggccatgtttttgagcaaaatatcatcgctttcctcgctaaaacatatgtctatgaatctgtctccgcttttatgcttgcgacgatggcgtttatgctgtctgcggtattccggaacagttcattagcggtcggattttctatttttctattggttatggggaacacggcgacggtatttcttgctgcgaaatttgaatggaccaaatatattttatttgcgaacacggatttgtcgcaatatatgaacgggactcctttagtagaggggatgacgatgacattttcggttgtgatgcttgtgatttacttcgttatttttctggcgcttgcattcggcgtcttcttaaaacgggatattgccacctgatataaaaaagctgttttgcctttgcaaaacagcttttcgttttagatgaaaaaaacctgccggcgtacaccggcaggtttttttaaacaatttatgcttttgttacgttagcagcttgtggtccgcggtttccttcaacgatttcgaaagaaacagattggccttcttctaaagttttgaagccttcgccttgaatagcagagaagtgaacgaatacatcgtcttgaccttctacttcgatgaatccgaatcctttttcagagttgaaccattttactttaccttctaacatgaaatttcctcctaaagcgacaaacgcttaaattcactattcttgctctaaaacaaacttccaagacgaaaactcttacaaaactttcttcttaaagatagttcgaacaaaaataattacctttactctaccagtaatccgaagaaaaaacaactgctaaatgtaacttttttcgaaataacatgttttaagaggaaaacgctctgatacggaaatctgatttgagaccagaacagcccatttgcagctgataaaaaccgctttgcagcctcttaaggaagcaattgacaaccctttttttaatcggtattgtatgtaatcatgagcccgaataccatggtgcagcttctgtacataaaaatagatagggagtaggtcaacttgaatctgcggcttataaacagtctgtttcttttcattttgatcatgtcacttacttcatgcgattatcctgacgggaaccggaccattactatcggaatcaatgaatctgatcaatcgatctgggagtttgtcgcgaaaaaagccggtgaggaaggattgcagctttctttggtaacgttttcggattatgctgaggccgatttggcacttgccggcggggatctcgacgccaatgcgtttcaatccgttactaattttaaatctttgccgcctcacgtgaaaaagaagctggcccctttaggaacgacatatgcggcatcgctgggggtgtattccaagcaacataaacggctgaaggatataccggacggagcggtcattgccgtgcctgatgaagcggcggccttcggcagggcgctttttctcatgcaggaggccggactgattacattgaaaaagggattcagcggtacggggtcaacggatatgatcaaggacaacccgaagcatctgaccttaaaaacggaaacaaaaaagaacgcctatcaggcggcggaacatgctgacgcagcagttctcagtcaaagcgaggcgaaaaaagcaggatttcatgcggagaaggacgcgctgatccgatcggcgcaaatgaaggaagcgtatattcatctgatcgccgtcagagctgaggataaagatgatgaacggatgcaaaaactcctgtctttgtatcaatcagatgataccgcggcgttgattgaaaaagaatatgagggcagcctgattcccgttttcctgaggggcggctttctcactgaaaagaaagaatgatttcctcttcgggcgatcattcttttttttcagtgctgcacacttgattgcgccctgatgttttcgctttgtacagcatccggtccgcgatcaggggcaatgtctgagggtccggtgtatttgtcggataatgcgcgatgccgagggaaacggtcacgggaattgtatctccgctcgtcagcagaatcgggttcgcgtcaatcgtgtgcctgatttcctctgcgaggtgaagcccttttgtatacgtgcaattgggcataagcacggcaaattcttccccgccgatgcgggctgacgtatgagaactgctgagtaagaacctcaggcgcgcccccagttccttcagcacttggtccccttcataatggccgtattgatcattgatctgcttaaagtgatcaatatccaaataaataagcgcgagctgagacgagggggattgagacgtccgatcgtacagaacgcgcgagacttcctcgaattttctcttattaaaaatccccgtcagaaaatcataattcgcttgaaacttgtattgcttgaacaaaacgcgggcatcggcttcgtgtttgatgatatacagtgacagcattccgcccaagatggaaatgagccaataataaacgagggccccggcaggctgttcaggcataagaaacagcagcgtcaaggtgaaaataacatttgaaaaaagcagcataacgaacgccattttatgatccggcttttttcctctgaggacggccgcagaaagtatcgcaataaccccgacggcggcgatggaaaaaatggcgcttgcattgaaattgatcaggatacggcctgcgacgataatcgcaaaggcggctgccgtagacacccagcctccgtaaagagcggcgatgataatggggatatttctgagatcaatgatggaatcggagtaagaaaagccgaaagcaatcagaaaaacccctaaaagcccgcagaccgtccccttcagtaattgaaacatcggacggtcttctttatacgaaagcgactctttaaaaagaagggtgaacagataattaaatgtgattaaaatcgttaaattaagaaacagttccttcagcataacaatcacccttatataagttactagagaaagggtggaaagaaaagagaaaaatcaataaaaatacatatattgtcaatccttacttgaccgatcggaattgatataatatagtgttaaaggataatgagcaagggagtgtttacctgttttggagaatttatttgtagtcttacatgtttttattatgcttttgcttatagcaggtctgtttgtcatgcaaaaaaaacacgtttccttttctaaacgtgtctttaccgcgctcggactaggcattgtattcggttttgcactgcaattgatttacgggccggcatcacatatcgtgacacaaacggccgattggtttaatatcgccggcggcggttatgtcaaattgcttcagatgatcgtcatgccgctagtctttatttctattctcggcgcatttacgaagctgaaactgacccataacatcgggaaaatcagcggactgatcatcggaattttgatcgccacgacagcaattgccgcggcagtcggaattgtttcggcgctttcttttgatctgaaagccgtccatatcgaccagggaagcaccgagttatcaagaggccaggagctgcagcaaaaatctgaggatatgacggccaaaacgctgcctcagcaaatcgttgagcttctgccgggaaatccgtttcttgatttcacgggagccagaccgacttccaccatcggagtcgttattttcgccgctttcctcggcatcgcttttctgggcgtgaaacggaagcagccggagcacgctgcgacgttcagcggaattgtcgatgcggtatacgcgattattatgcgcgtcgtgacgttaattttaagattgacgccttacggggtattggcgattatgacaaagacgatcgcgacaagcgacatcgacagcattgcgaaactggggatgtttgtgatcgcttcatacgccgcgcttatcgtcatgtttatcgttcacctgctgctgattacgttcagcggtttaaatccgatcacatacgtgaaaaaagcatttcctgtcatggtgtttgcgtttacgtcccgttcaagcgcaggggctttgccgcttaatattaaaacgcaaaaaagcatgggcgtccctgaaggaattgcgaacttcgccggttcattcggtttatcgatcggccaaaacggctgtgccggcatttacccggcgatgctcgcgatgatgattgcgccgacagtagggcaaaacccgtttgaaccgggatttatcatctccgtcatcgccatcgtggcaatcagttcattcggtgtagcaggcgtggggggcggcgcgacatttgcggctctgctcgtcctatccgctttgaacatgcctgtcgcgcttgccgggctgctcatttcaattgagccgttaattgacatggggcgtaccgccttaaatgtcagcggcagtatgaccgcagggctgttaacaagtaaaatgacgaaggaaaccgataccgcggtgtacaatgattcctcaatcgtcattgaagctgaagaagcttaataaaaaagcagatagcgctaaaacgaaaaatccttcatcgttgaacgaatgaaggatttttttcgtttctaatgatttccgggttcaatttcttccagcatattcatcacggtgctgtcatttaaaacatttaccgcgctttcttcgaagtgaatcggctcggtatagtgaggcttcggcgaagtttctttactgcggtctgcctgtccgtccgtatgggatgagccggagtgattgcgggaagtctgctcatgctgctgtccgccggattccccgccgaaagcctgtttgatcagctcggcaggctgcacggagcctgtttgtgaatgccgtgctttgtccgtgtgctgctgtccgccggattccccgccgaaagcctgtttgatcagctcggcaggctgcatggagcctgtttgtgaatgccgtgctttgtccgtgtgctgctgtccgccggattccccgctgaaagcctgttgaatcaggtcagcaggctgcatggagtgtgtaccatctttatgctgcattcggcctgaaaccattccggagattttccggcggatttcgggtgataaagctgcaatcagaatcgatgatccgatcagcagcgctgtcgggctgatgccgcttttttgtctgaacaagttaaatccctcctcattcaattgattacgcttacctttccctatccttctgatatttatccaaaccgctcagaatgcaaacggcgtgcataaatcccgccgaatagaaaaacctatacgtaaagtgagaaaggaggaattcacatgataaaaaaacaagcagttatttctgcccttcttctgccgatgctgattaccgcagggtgcagtatggggaaccagggagaaggaaaacgaaatgacaaccgcacccagaatgtaaattaccgcaacacacctaacgacggtgcgacaaatatgaatacagtgaaccgtcataaccaaaacaccgatcacaatgacaaccgtaacctgagagtggctgataaagccgcagacaaggtgactgatttaaaagaagttaaaaatgcgactgtgatcgttgccggaaacagcgcttatgtagccgttgttctgacaaacggacaaaaaggcgccatcgccaaccatttgaaaaataagattaccgataaggtgaaatcagccgataaacatgtccggactgtatatgtatcagcaaacccggacttcgttgaacgtatgcaaggctacggaaaacgaatccaaaacggccacccggtatccggactgtttgatgaattcggccaaatggtgcagcgtgtattcccaaaccccaataaataaatgaatggaaaagccgcatttgctgcggcttttttattttatctgccgtcacgacccagcgcttctgagcataaagtaaagaatgagatgaaaattaaaggatcggggaggggagcttgtttgcgtgacggcatggggaaacgggcggcattcactctgatcctgtgcggagtccttgtcatattggctgtcagttcagccgtttcagtaagtatgatgtacgtcctgtcaggccaaaacagccgctctgttccgacgaaggaacaagtgactgaacacatgaataaagaaatttacaaacatacagcgatttactatacagcggatgaaaagccgctcttggatctgaccaagcttacgctggaccacgcaaagcgtatcaaccaaatcattgtcggctataaaggagcggcgcctcttgaactcattttcttttcggatgaagctgaaatggagcaatactcaggattgaaaaatgtagtcggtttttattcagagcaggagcagatgatggggctcttgccagaagagaaaaaacagcttttgaaaaaagatgagctggccgttttcatgtataagcaattgattatacatgaatatacacactacgcatttcatcaaaaagcgcggcaattggggacggatacgtctgtatttccgctttggtttcatgaggggctgagcgagtgggttgcgcattatgatgtggtcattgatccgattgcattttccgtcgtgccgtttgatcaattaacgaccgaccgaaaatggcagaaatcgcgtatggaatatgaaacggatgtttatttgcaaagtttctatatgataaaggatttaaccgaaacattcggagaaggcattatcttaaccattatcaataaaaccgccgaaacacaggattttgaaaaaggctttgaagcagctacgaaagaaagcctgaaacaatttgaacatgatttcacaaaagcatatgaaaaaaagaaaacggcattggagagtcagctttccaacgccgtttttttcattaatggaggttttgctgctgctgtcccatttgtcctttaatcggaggcatttgcggctgtccctgcgccggcgcaaatgaattcagcatggtctgcatatcttgtgcattgagctgaggaacctgataataaccgtgtttgttttggtataagaagatttcatacgccatttcgacatattgctgaatttgggcggagagcactcttcttgtgacgggattggtcatttcaagcgagctcatcgtcaagagagaagcttgagctttaatcaggccgagcatatggccgcttattccgagatctttgacatcatttaatgattgattcggttttttcggctgagtcggttttataccgtagacggcctggttctgttcctccatcatatatgtcgacgtttcctgagaaggcttttggccggtcttaaagcattctgccgtcagattatagagtccgagaatgaattgatactggcggtcaagaatgtcggccagctgctgatcctgtataaactgtctgagcatcataaattgatccaaaacgccgactgttccggccagcacttcatgcatatcgaaaagctcatgtcctccgtgattcacttgcggtgaacccggaatcccctgatttactggcggctgctgctgattctgctgctgttccactggttgttttcctccttcatgtcaaatcacatttaagatgtgaaaaaagccgatccgttatacatcaagacttatttcgttacgtggggattatttactattttgcgccagcgaagacaatctttacaaaaaagtgatgtgatttttaagaaaataagctaacgtatttcttagaagacaggggggaaatgaatgaagaaaaaaaggggtttgcgtctttcgtgctgtttgctgacggtttgttttatgatgttcagcgtgaaagatgcggaagcaatcggacaagccggatcactgaatgaagctggaacggataaagcgtataaagaacggcagactgaagactccggccgtatcccgctcagaatcatcagcatgaatgatctgcacggaaaaattgatcagcaatatgagcttgaccttaacggagacggtaaaccggatggcactttcggacggatggactacgccaccgcgtacattaaaaaggcgaaagccgagaaagaacacgcctttgtcgtgcatgcgggcgatatgatcgggggcagctctcccgtgtcagccctttttcaggatgaaccgacagtagaattgatggaagacatcggttttgatgtcggaactgtcggcaatcacgaattcgatgaaggaacgaatgagcttaaacggatcatcaatggaggagatcatccggacggtaaggggacaagcggttatgacggccaagatttcccgctcgtctgcgccaactgtaaattgaagtcaggggagtcctttctgccgccgtatgaaatcaaatacgtttccggaattccggtcgcatttatcggggttgtaaccagatcggcggcaggcatggtcatcccggacggaattaaaaatattacgtttacggatgaggtaaaggccgtcaatgacgccgccgcagacctgaagaaaaaaggaattaaagcaatcgccgtgctcgcccatatgtctgctgaacaaaatggctcagccatcacgggagaatccgcaaagcttgcaagcggaacagactcagagattgacgtgattttcgccgcgcacaatcataaagtcgtaaacggagaaatcaacggcaagctgatcgtgcaggcatttgaatacggaaaagcaatcggaatcgccgatctcgaactagataaagagtcgaaggatatcgtgaaaaaatcagcggaaatccaatatatcgatcaaagtaaaatcaagcctgatccggatgcggcaggcatattaagcaaatatgaagagaaagtgaaaccgattatcagcgaagcggtcggggaagcggcccatgatataacgggcgggtattcaaatgacggcgacacggcgctcggaaatctgattgccgacggtatgaaagcgaagatgaaatccgattttgcgcttatgaatgggggaggcatccgggacggcataaaaaaagggccgatcacatggggagatctttataatgtacagccgttcggcaatgtgctgacgaagcttgaaatcaaaggaaaagatttgcgggagatcatcaacgcgcaaatttctccggtgtacggaccggattacagcatcagcggattttcctatacatggaacccggaaaccggacaagcggcggatgtgaaaatggcggacggtacagacatacagcccgaaaaaggatatacagtaacagtcaatcaatttatggcgacggcagcgggggcaaaatacggtccgatcgggaaactcggcaagaatccggtgacggggcctgaggatttggaagcgacagtagactatgtcaaaagcttttccgcaccgatttcttatcaaaccgacggccgcatccgcacggcatcagccgccgaaacacctgatgacaccggcaatcagccgggaagcggggaaacaccgggcagcaccgggcctgataaaggagaaaaacctcaaacggaaaaacccgctaaaaaaccggatgcagcagaacagcctgatcaaaccaaaaaacctgaacgtcctgtcgtaaaagaagcagcatctgatacagtgcagtcaattcccgaatcccgtacggcgtctgccgcagattcggaacaaagcacagaacagactgaaagcggcacacaaaaaggccgcccattgcctgatacttcagcgggcagccatcagacggcattggccggcctggtgatcacgggtgccggcgtatattggcttttcagaaagaaaaggggaacccgcacacgatgaacaaactgaaacatattccgcttctcgtcatcatcgcaggtgttatcatcacatgttacggaagctggaagatcattgattcacatatgaaaacgaaccaatcgcttgaagaagcaaaaaaagcaacagaacctgtcttggaaaagaacgaaacaaaaagcgctgtgcaggcacagcgcaaaaaagaatttcaccccgaaacgggtgaggcaagcggcattttagaaatccctgaaattgacgctgagctcccgatcgtcgaagggactgacgcagatgatttagcaaaaggcgtcggacattataaggacagctattatcctggcgatcacggccaaattgtgttatccggccacagggacacggtgttccgccggaccggcgaactgaaaaaaggagacagactgaacgtgattttgtcttacggcacgttttcttataaaatcagccgtacaaaaatcgtcagccgggatgatacgtctgtcatcacccttcaacacaagcgggaggaactgatcctgaccacttgctatccgttttcttacattggaaatgcgccgaaacgatatattatatatgccgacccggtttaagaaaaatacgtttcggtaaaatgagccagatcagccggcatcggcgcctcggcaacgatttcttctcctgagatcggatggacgacactgacttttttggcgtgaagcgcctgcctgtgaaacagcgccctgcttccgccgtacaggtcatcgcccgccaacggatggccgatgcttgccatatgcaccctgatttgatgtgttctcccggtttccagttcaagctctgccaatgtaagctgcgcaccgggatgatagcccttcactttgtaatgggtgacggcggcttgtccgccgggtgagacgcgccgtctgacggaatgtgacctgtcgcggccgatcggcgagtcaaccgtgccttttttcggcgtgacttttccttccgccgcggcgatataggtgcgttttaatgttttggtttcgagctgacggtcaaggattgcatgggccaggcggtgtttcgcgaaaacgaccgcgcctgacgtgtcacggtcaagacggtgaacgtggcgcactttcgcttgttcgccgttgatttgaaaatggtaagcgatcaggttgctgagggttccggtctgaccctcttcatttggatgagtcggcattcccgccggcttatttgcaatcagcatatgactgtcctcaaataaaatgtccggctctccgtattcaggaattaccgaagaacccgttttttcctgaagatcaatgaataagcggtctccggttttcagtatgatgttgtttttcggggatgtccgattcacctgaatgcttttttggttcatccattccgttatcacgggttttgacgcctggaattcagatttcaggactgaaaacagccattgtccggcgtgtttttccgtaatcaggagttccagaccgcggtcattttgtttcatatcataaagctccttttcaagcggaaagcggctgtttcaataggaaacacttaccttagctttcgcgtttttttctatgctattcttgataaagattaaggatattcacatggcaagaaaggtgattgatgtgagaattgtgaacgcagcgactgacggacaagaaagcgcgatacaagagctttcctctgaattgtttcaaaatgtctttcctctttatttctccgaactggaaattcagcgctttaaaaaaaggggcgtattgtctttacaaaaccaacgttaccaaggaactttaaaagaagcgtttcaaattatggcttgtctgcaaacggtacatatcatgctgtcaaagccgcaccccgtatatgacgtcaaagagcgggcgctgtttgataaaaattgcgctttgctgaatgaatgcggaatgaattttccctttacctatgatgatttcgagacaggggccggatcagaagcctgcggtcacagaaggctgatctgacgggtataaagagccttttgacaggctcttttttgcttccttgacatgataccacaatttctttcctctaactccctttataatgagtcaaatccccgagcataataaaatgcgaaaggggtgctttacaatgagttcaatcaaacaatcaatgactacccacgtggctaccgtttctcccaaccaaacgatccaggaagcggctgcgctgatgcaccagcataatgtcggagcaattcccgtcgttgacggaggggaattaaaaggaatgctgacagaccgtgatatcgcattgagaacaacggctcaaggccgcgacggccaaacacctgtttcacacgtgatgtcttctcaagttgtatccggaaacccggaaatgagtcttgaagaggcgtcacatctgatggcccaacaccaaatccgccgccttcccattgtcgatcaaaatcatctggtcgggatcgttgcgcttggagacttagcggtcgatcagcgttcaaatgagtctgcgggagcggctctttccaatatttccagtcaaaacacacagtaacggatgaagagagcttgcactcatgcaggctcttctttccgtgagaatgttacattttgaatgcaaaagaaattcacggtatagtgtatacataggtcagtacgtttagctaaaggagctgtaaccattgataaaagcattaatctttgattttgacgggttaattttagatacagaaacccatgaatatgaagtgctgcaggaaatgtttgaggaacacggttcaacattgcctttatccgtctggggaaaggtgatcggaacggcggcggggtttaagccgttcgcatatttagaggagcagctgggaagaaagctcgatcatgatgaactgacggcgatcaggcgcgggcgcttcgaacagcggatgaagacggaaacggcgcgtcccggagtggaggcttatttagccgcggcaaaagaattaggattgaaggtggggctcgcttccagctcagattttaaatgggtgtcgggccatctgaaggaattaggcctgtttgatgaatttgaagtgattcagacggctgacgacgtagaagaagtgaagcccaatccgaagctctatctgaaagctgcggaacatttaggcgttgaaccttctgaatgtcttgcctttgaggattcggtcaacggctcaatcgcagccaaacgcgccggcatgaaatgtgtcatcgtgccgaataaggtaacgagcgccctgttatttgaagaatacgatcacagactggaatcgatggcggaaatggaacttgaattactcttacagcgattgaacgatcaaaacgaaccggcagggggaagcagcattgtctgagaaacttgatctgacccgttttgaaaagaaaatggtcatacggaatatggaagagaaagatatcaacaaaattattgagctgcaaaaggattgttttccggggatggagccgtgggagcctgagcatttaatcagccatctcgcgcactttccggaaggtcagttttgcgccgagtatgaaggggaaattatcggttcatgctcaagcctgatcatcaatttcgatgaatatgatgaccgccacacgtggcaggacattacagacgacggttatatcacgaaccacaacccggacggattgaatctgtacgggattgaggtaatggttcacccggaatacaggcggatgaaaatcggacaccggctgtatgaggcgagaaaagacttggcgagacgattgaatctgaaaagcatcattatcggcgggcggattccgaattatcataagtatgcggaagaaatgacggcgagagcctatgtcgaacaggtgacgcgccatcagatttatgacccggtgctttctttccagctgatgaacggatttacgctcatgcggatcaatccgaattatctcccggatgacaccgcgtccattaaatatgcgacattaatggaatggaacaatgtcgattatctgccgcagtcaaagcgctattacaaatcggcatttccggtgcgcatctgcgtcattcaatatgaaatgaaaaagatttattctttcgaggaatttgccaatcaggttgaatattatgtcgatgtggcttcagatgcgagatctgatttcgcggtattcccggagattttcacgacgcagcttatgtcatttctcgaagagcgttctccgagtctggccattcagaggattaccgaatataccgaggactatatcagcctctttacagatctcgcggtgaaatataatgtgaacattatcggcggctcccacttcgttgaagaagaggggaaaatttataacatcgcctacttattcagacgtgacggcacgattgaaaaacaatataagcttcacattacgccgaatgagcggaaatggtggggcatcagcgccggagacagggtgcgcgtatttgatacggactgcggaaagatcgccattcagatctgttacgatatcgaatttccggagcttgcgagaattgccgcggatcaaggggcgaaaattatctttacgccattctgcactgaagaccgccaaggctatttgcgcgtaaggtactgctctcaggcgagagcggttgaaaaccaaatttacaccgtcatctcaggtacggtcggaaacctgccgcaaacagaaaatatggatattcaatacgcgcagtcagccatttttgctccgtctgattttgaattcgccagagacggaatcgtcggtgaaacgaatccgaatatcgaaatggtcgtgatcggggacgtggaccttgaaatcttaagaaggcagcgtgaaaacggaaccgtgcgccagctgaaagaccggcgcaaagacatttaccggattacgcatctgaaataaaaaaacgcccgccccgcttaagggcgggtttttttataaaaacacttgcaccggccccggtttcgggatatgctcttgtagccctttcgctttctgggagaaagcgtttttttaattgccgccgctttattgactcgcccatgccgcgcctttatattcttattaagaggaaaacttcaccatgagaatcggcgtcagaagccgggcagctttcgatacagtgcaatgatattgaaagggagatgagcggtgtggaacatgtacaaaaaaatcagtcactcaaacaaaaggataaagagctgatttggcacgcgatgaaaggggcggagccggatgacagcataatcgtccaaaaaggggaaggcgcctgggttacggacattgacggcagacggtatttggacggcatgtcaggattgtggtgcgtcaatatcggatacgggagaaaggagcttgccgatgcggcttacagccaattgaaggagcttccttattatccgctgacccaaagccatcaacccgcgattgagcttgcggaaaaactgaatgaatggctcggcggcgattatgtaatcttcttttccaacagcggatcggaagcaaatgaaaccgcgttcaaaattgcccgccaataccacattgaaaacggcgatcacagccgcttcaaattcatctcccggtacagaggctatcacggcaatacgatgggggcgctcgccgctaccggccaggcgcagagaaaatataaatatgagccgctctcacaaggttttttgcacgcggcgccgcctgatctttatcggaatcccggcgatgccgtcacattggaaagcgcgcatgaaatcgaccggatcatgacgtgggagttaagcgaaacgattgccggcgttattatggaaccgattattacaggcggagggatactgatgccccggacgggtatatggcaaaggtagaggacatttgccgccgccacggcgcgcttctgatcagtgatgaagtcatttgcggtttcggccgcacgggagagccgttcggatttcagcattacggcgtttcaccggacatcgtcacaatggcaaaaggcattacgagcgcttatctgccgctgtcggcaacggcagtaaaacgggagatttttgaggcgtattcgggcggtgagccgtacggccgcttccggcacgtgaatacattcggaggcaatccggcagcctgcgcccttgctttgaaaaacctgcaattgatggaggacgaaaatctgatcgcccgctcccgggagcttggagaacggctgctccgtgagcttgagccgctcaaagaacatccggcggtcggcgatgtacggggcaaaggccttcttgccggcattgagctcgtcaaggacaaaatcacgaaggaacccgctgatgccgctcttgtgcagcacgtcatcaccgcgtgcagagaaaaaggcctgcttgtcgggaaaaatggtgatactgtagcgggatataataatgtcattcagctgtcaccgcctttttgcctgtccgacgaggagctctctttcatcatttcgaccgtcaaggaaagcgtgctgagcattgatttttaaagtaaaggagtaaaacatgagttttcacaaccagaagattctaccggctatccggaacatgaagcaattcgatgcatttttagagagtccgttcttatacggcgtcattttagatatacacctcggtcaattaaaaggtgtcgtgaatgaagcgaaaaaacacggaaaacttctgatggttcacgtcgatttaattcacggcattaagcatgacgaatacggtgcggagttcatttgtcaggacatccggcccgcgggcatcatttcgacgagatccgccgtcatcgtcaaagcgaaacaaaagaaaatatacgcgatccagcgtctgtttctcttggatacgagcgccatggaaaaaagcatggaattcgtcggaaagcataagcctgactttatcgaggttctcccgggcatcgttccgactttaatcagagaaattaaagaaatgacggggattccgatttttgccggcggcttcatccgcacggagcaggacgttgaaaacgccttgcaggcaggagccacggccgtgacgacttcagacaccgaactatgggctaaatatgaacattctatgacaaaaaaagattgacaccgcttacacccattgttacaatagacctaggttaatactatgtgatggagacccggagacccacaacagctctttacggaagcaataaagcgtaaagcggtttgttgtgggttttttattctctataactctgtcaaacctgctattttgtcatttaggaggaatgatgatgacagcattttggggagaagtaatcggtacaatgctgcttgttattttcggcggcggcgtttgtgcgggagtcaacttaaagaaatcgctttcataccaatccggatggattgttattgtattcggctggggattgggagtagccatggcggcatatgccgtcggcagcatcagcggcgctcacttgaatccggctttaacgataggccttgcgcttgaaggcagctttccttggaaagacgtccctgtttatattgcgggacagatgatcggagcaatgatcggtgcggttgttgtgtaccttcattatctgccgcattggaaggcgacggatgatccggccgctaaactgggcgttttctcgaccggcccgagtattccccatacatttgggaatatgataagtgaagtcattggtacgtttgtgcttgtgctcggcattttggcaatcggagcgaatgaatttacaaaagggctgaacccgctgattgtcggattcctcatcgttgccatcgggatttctcttggagggacgaccggatatgcgatcaaccctgcgcgggatttggggccgagaatcgctcacgcctttctgccgatcccgaaaaaagggccgtcaaattggaaatatgcctggattcccgtaatcggtccgatcatgggcggtgcgttcggcggcgtattttacaatgccgcgtttaaaggaaatgtgacacctagcttttggtttgtaagcgttataatggttgtagtgcttttcatactctatatttataccaagaaatctcaatcacagaaaacattatcaaattctgaatatatttaaaaaggagagcggcatcatggagacctatattttatcaattgaccaaggcacaacaagttcaagagcgattctttttaataaagaaggaaaaatcgtgcattccgctcaaaaggaattcacacagcatttccctcagccgggctgggtggagcacaatgcgaacgaaatctggggatcggtgctcgccgttatcgcgactgtgatttccgagtccggaatcagcgctgatcaaattgccggcatcggcatcacgaaccaaagggaaacgacggtcgtatgggataaagataccggaaagccggtatacaatgcgattgtgtggcaatcgagacaaacatccggcatttgcgaagagcttcgtgaaaaaggatataatgatacattcagagaaaaaacgggacttttgatcgacccttatttctcaggaacgaaagtcaaatggattcttgacaatgtagaaggcgcgcgggaaaaagcggaaaacggaaatcttctgttcggaacgattgattcatggctcatctggaaaatgtccggaggcgcggcgcacgtaacggattattccaacgcttcaagaacgctgatgtttaatattcatgaattaaaatgggatgacgagctgcttgatattttaggcgtgccgaaatccatgctgccggaagtgaaaccgtcttctcatgtgtacgcgaaaacggttgattatcatttcttcggtaaaaatattccgattgcgggagcggccggagaccagcagtctgcgctgttcggtcaggcgtgctttgaagaaggcatggggaaaaacacatacggcacaggctgctttatgctgatgaataccggagaaaaagccatcacttctgatcacggccttctgacgacaatcgcctggggattagacggaaaagtcgagtatgcgctggaaggaagcatctttgtcgcaggttctgccatccaatggctgagagacggcatgcggatgttccaggattcgaaagaaagcgagacatacgcagagcgtgtggattccgctgacggtgtttatgtcgtgcccgctttcgtcggattgggcacaccgtactgggacagtgacgtgcgcggctcagttttcggcctgacacgcggaacgacgaaggagcattttatccgtgccacgcttgaatctctcgcatatcaggcgaaagatgtgcttgatgccatggaggctgattcaggcatctctttaaaaacattgcgtgtagacggcggagcggtaaaaaataacttcctcatgcagttccagagcgacttgcttgatgtgccggtcgaacgtccggaaattaatgaaacgactgcgctcggtgccgcgtatttagccggaatcgctgtcggctactggaaggacagcactgaaatcgccgatcagtggaaccttgataagcaattcaaaccggaaatggaagatgaaaaacgcgttgaattgtacggcggatggaaaaaagcagtaaatgcagctatggcttttaaataagataaaattatggtatactgaaaacaagttaataggaacggtcctgagatgaggagagaccacagcaccaaagtgatgacatgcgctttggctgttgtggtctctttttctataccgtgacaacaaggaggaagcgtaatgatgaatcaccaattttcaagtttggaacgggatcatatgctggaagacatgactaaaaaacatacgatctgtttattataggcggaggtattacgggtgccggtacggcgcttgacgctgcttcaaggggaatgaaagtcgctttgagcgaaatgcaggatttcgcggccggcacatcaagccgatccacaaagcttgtccacggcggtttgcgttatctgaagcaatttgaagtcaaaatggtggctgaagtcggtaaggaacgcgccatcgtgtacgaaaacggcccgcacgtcacgacgccggaatggatgctgctgccgtttcataaaggcggcacgttcggttcattctctacttcaatcggcctgcgtgtgtatgactatttagcgggagtaaaaaaatcagagcgcagaagcatgctgtctgctaaagaaacgctgcaaaaagagccgctcgtcaaaaaagacggcttaaaaggcggaggctattatgtagagtaccggacggacgatgcgagactgacgattgaagtcatgaaagaagccgttaaattcggtgctgagcctgtcaactattctaaagtgaaagaactgctttatgaaaaaggaaaagttgtcggcgttttaattgaagatctgctgtcaggcaaggaatacaaagtgtacgccaaaaaaatcgtcaatgcgacaggtccgtgggtcgacgaactgagagaaaaagaccacagcaaaagcggaaaacatctccagcacacaaaaggggtccatctcgtattcgaccaatccgtattcccgcttaaacaggcggtgtactttgatacgccggacggccggatggtgttcgccattccgcgtgaaggaaaaacatacgtgggtacgaccgatacggtttacaaacaaaaacttgagcacccgcgcatgacggtgcaggatcgcgattatgtcgtcagctccatcaattatatgttcccggaactgaacattacggcggacgatattgaatcaagctgggccggcctcagaccgcttattcacgaagaagggaaagacccgtctgagatctcccgtaaagatgaaatctggacatctcaatcaggcctgattacgatcgccggaggaaaactgacgggctaccgtaaaatggctgagcacattgtcgatcttgtccgcgaccgcttgaaagaagagggcggccaggacttcggcggctgcaagacgaagacgatgccgatttccggcggacatgtcggcggctctaaaaacttcgagtcatttgtggaagcaaagacaaaagacggcttgaaaatcggtttatcacaggaaaccgctaagcagttagccatcagatacggctctaacgttgaaaatgtattcagccggattgaaggcctgaaagatgaagcggaaaaacgcgagattccggttcacattctggcggaagcggcttacagcatcgaagaagaaatggctgcgacacctgccgatttcttcgtccgcagaacgggaagactgttcttcgacatcaaatgggtgcaaacgtataaaacggccgtgattgattacatgagcgaccgattccaatggaatgacgaaacgaaagaaaaacacactgagtggttaaatacgctgctgcacgacgcggttgttccgctcgaacaataataaccggagggctgtgccgaaaaggcatgagcccttcttttatctttttacataaagcatttggttaagttatcaagtgacacgggcagccgcttcatattaaaatatggtcataagctgaaattataggaggacgaacatgagttggagtaagagttacgaacgctggaatcaggccgaacaattagattcagaattgaaaaaattattggcggacgcagaaggaaacgagcagctgctggaagattttttctacaaaaatcttgagttcggaacaggaggcatgagaggagaaatcgggccgggtacgaacagaatgaacatttacacggtccgcaaagcatccgccggacttgcggcgtatatcgcgaaacagggggaagacgcgaaaaaaagaggggttgcgatcgcatacgactcccgtcataaatctcctgagtttgcgatggaagctgcaaaaacccttgcttcccaaggcattcaaacatacgtctttgatgagctccgcccgacgcctgagctgtcttttgcggtgagaaagctgaacgcttatgccggcatcgtcgtgacggccagccataacccgcctgaatataacggatataaagtgtatggcgatgacggcgcacagctgccgccgaaagaagcggacatcgtcattgcggaagtgaatgccatagaaaatgaattaacgattcaagttgaagatgaacagtcgctgaaagaaaaaggtttgattaaaataatcggtgaagaaattgataaaccgtatactgaaaaactgacttccatctccgtacatcccgagctttcggatgaagtggatgtcagcgtcgtgttcactccgctgcacggcacggcaaataaaccggtgcgccgcggtcttgaagcactcggttacaaaaacgtcaccgtcgtaaaggagcaagagctgccggacccggatttttcaaccgtcaaatcgccgaatccggaagagcacgcggcattcgaatatgccattaagctcggagaagaacaaaatgccgatattctcgtcgctacggacccggatgccgaccgtctcggcattgccgtaaaaaacagcgaaggcaagtacacagtgctgacgggaaaccagacaggcgcgcttttattgcattacctgctttccgagaagaaaaaacagggcacccttcctgaaaacggtgtcgtcatgaaaacgattgtcacgagcgaattgggccgcgctgtcgcttcatcgttcggattagatacggttgacacgctgacaggcttcaaatttatcggtgaaaagatcaaagaatatgaaaaatcaggccaatacacgttccagttcgggtatgaagaaagctacggctacttaatcggcgatttcgcgcgtgacaaagacgcgatccaggctgcgctgttagccgtcgaggtatgcgccttttataaaaagcagggcatgtcgctttatgacgcgctgctgtccatttttaaagaatacggatattaccgtgaaggcttgaagtcattgacgttaaaagggaaacagggagcagagcagatttccgctatcctgacttcattccgaaacgatccgccgaagcagatggccggaaaacaaatcacgcaggctgaagactattcaacgggaaaacggactgtatttgccgatcatcttgaagaagatattgatctgccgaagtcaaatgtcctgaaatatttccttgaagacggctcttggttctgccttcgcccatcaggaacggagccgaaagtgaagttctatttcgccgtgaaggggacttctttacaagacagcgaacagcgtcttgccgcattatctgaagccgtcatgaaaacggtggatggcatagtggaaaaaacgaaataaacaacaaaccgccggaagcgacatccggcggtttttttatacgcctcatccgaaagtatgaggaaaattcatgctgaaaacaaaggaatatacagaaaagaattgatataatatggataattctgattggccggagtgagggaaattgacgaaaacgacggtagaaacgttaaaaacgttaaaagcgattgcggaaaccttaaaccaaaaccacgatttaaaggaagcgcttgataaagtgctccgcgaactgctcagcctgaccggactgcagacagggtggatttttctgattgagccggacgggtcttatacgctcgccgcatccgcttatttaccgcctgctctcggtcagcgggaaaatgcactcatgtgcagcggggaatgctattgtctgaccaaattcagcaatggcggattgacaaaggccgtaaacataatgaattgcaaacggattgaatttgcggaacagacgacgaactgccgcgatacggagggcattacccatcatgcgaccgtaccgcttgaggacggcggccggaagttcggatattgtgcctcacgtgctgacccatatggttcaggatgatcaggataaggaaaaatattatcagctgatcccccgtgaaaaagatgttcttcaagaaatagccaaaggaaaaagcaataaggaaattgcggcggccctgtttatttcagaaaaaacagtgaagacccacgtgtccaacctgctgtcaaagctgaatctttccgatcggacgcaggcggcattgtatgcggtaaaatataatgttttgggaaaggcggtaaaatcatgagcatattagtgatcagcggcacaccgagaaaaaacgggcggacgagaattgccgcttcttatatcagagatcggtttcataccgattttattgatttgagcgaaagtgaactgccgctttataacggtgaagaagaacagaacgagctgccttcagtgcaaaagttaaggcggcaggtgaaaaagtcagcggccgtcgtcttattatctcccgagtatcacagcggcatgagcggcgctttaaaaaacgccatcgattttttaagcagcgatcactgggcatacaaaccggtggccgtcattgccgcggcgggcggaggaaaaggaggcatgaatgcgctggcgaatatgcggacggtcatgcggggcgtctatgcaaatgtcatcccgaaacagctggtcttagacccgattcacatcgacatggagcgccggaccgtatctgaggatatggcggtcagcctgaaagacatgatcgaagagctgaatatgttcacaaacacaagaaatcccggcgtctgacgccgggattgttttatgtcagcatggctaattgatcttcataagcgagctctgtcgcatgatcaatatacccgagaagggaatacagctctttttcaagcacggcatgatcatattcgaaatgatacgcgtgtagaaagtgctcaatacgctttgataataaatcatcttttgtacgaaccatcaaaattaataaattgtcccattgagaccggtgtgtgtaatacaaggctttatcataatcggcatgatccatcttacgcttctcctttcaatgagaagttctccgttagtttatgccgccgaagcccggatgcaacgggggaaaacttggtgtccttatcactgcggcatagcaatatgagggagacataaaataaaaccgcatatccgtctcttctttggacacgctaagattgacaaaaaacgactcaggagaacataaagatgaaatcccttccatttgcgcttgccctcttgttttgcggcattctcattgcctctatcgctgaaaaagggcatacagaacacctcgatccgtcagttgaaaaatgggaacagctcgcatggaaccagcttgaacgtgaatacaagggggccgagcttaccgattattcgtacatgggccgtacaaaagtgaaccgggaacagacgaaagacgtgtttcgcgtaacggtgcaaaccgcaaaagaaacgttttcatcccgtgctgaagtgtatttccatcccgtaacaaaacacgtgatcagcatcaatattttcagactgtaaaaaagctgcacagccttatgcggccgtacagcttatcaggtatcagaagaaacgttttgcgccgaggtagcgctgtttccaataggaattgttcatgctggaaataacgactcccgaatcgttggcattaataaactggccgttcccgagataaataccgacgtgggaaggtccggctttataagttgagaaaaagacaaagtcaccgaccgccggctggctgactgatgtcattgtattccagtagcctgcggctgaaagtctggatacagaagtgaccttattgagaacgtaataaatgaaaccgctgcagtcaaagcctctcggcgtcgttccgccccatacatacggtacgcccagctgagcttttgcggcatcgatcattacattaatcttcgcgcttgttgaacctgtgccgcctgtgctgccggactgattcggtgtcgtgtttgtctgctgcccggtaatcgtcagtttctgtccgatttgaagaacatctgttttcagattgtttttctcgcggatctgctgggctgtcacattgaacttttgggcgatcacccataaagaatccccgcttttcacggtatatgtagtggttttccctgtatttccggactggttcggagctgacggtgaagacgaagagccggaagaagacgttttggtcagcttcagcacttgtccgacccgcagcatgtctgacgtcagtttgttgatgcttctgatttgctgaaccgtcatattgtatgcgtttgcgattttccagagtgagtctccgctttttactgtataggaggacgtttgcgtctggttttgattttggtttgaattgtcttttgacggcgtgtttcccgaagaagacgttccttttgttttcaggacttggtttacgtagatcgtatccgtttttaagttgtttaatactttgagttccgcaatggtcatattgacgctgtttgcgattttccatagtgaatcgccgagttttactttataggtcccggaagatgatgactgctttttgctgctgtttgagctgctgccaggagcggtttttttctgatcggtgcttgaggaaactttccccgtcacttgcagcttctgtccggcgcggattaagtcgcttgtcagaccgttcaattttttcagttcctgtacggacattttaaaatcagatgcgatcagccacagcgagtctccgcttttcactgtatagacgcttttagtcgtgccgctgttctttgaagatggctttttgctgccggaatctgatttgccgttaggaatgttgagcgtctgcccgatagaaagaacggtggattttagatgattcgctgatgtaatggcatccacgcttgtattgtagttttgggcaagcttccataatgaatctccgcttttgaccttaatcgtttgtgcttctgccggtgttacagctaacgcagacccgacgatcgcagatgcagtcaaaccgaccgctaccttttttttcatagtgaatctcccttttcctgcgataatttttctatccccattcgttgcagccgcaaggtgaggatatcagtaatgataatctttatatcggcacttgtctgcaatcgtttatcatattaatagaaatagtccttttttcttatgccggcataaaaaaagaaggaatgcggacattccttcagcttctgagcagtctcataatctcctctttgtttttgaccagatcccttaacgtatatttgtctaaaacggccaggtaagcttgcagggcttcattcagaaggttctttaagttgcaggcgggagatatgatacagagattttttttggagtcaaagcattctacgatgttaaagtcgtcttctgtatgtcgaacgacttctccaatgtttatgtcttccggtgtcattcctaatcgaattccgcctccccggccccggatcgtttcgacatatccgagctggccgagacggtaaatgactttcatgaggtggtttttagagatggaataagtatctgcgatttcttttatgttggaaagttcgtcggaatgtctggaagccaaaaaaatcaaaacgcgtaaagagtaatcggtatagttcgttaatttcatagaatgacctcgaaaaaagagattttgcttctgttacagtctatcatatatgaatctaaaatgaaaaaaaaggaatttgcccccttaactcaaaaaaaacgtgcgctccttctgagcacacgtttttttcgttaagacatcggcggcttacgatcgtcagccgattgatgtttttcaattttgcgatccaattttgcgagataacgggaggcaaattcttttccgccaagaccgaatgaaagtccgaaggcaagcgcgaaaccgcccagaatcagaataaacgcggcatttacgatcgtgtcggcgacaccgagctgatccagcgccataaagattgagagagtgataatggtatatttcgcaagcggcgccaggaatctgaattcctttccgctcagcatgccggcaagcagcctgctgacaagctgtccggccaaaagtccgattccgagaataaatacagcggccagaacattaggcaggtaagcgataataccggttgcgataacgacgagaaattcgagatgaacaagctgcagcgcctctgccgtaaagagcaggacgatgatgatctgaacaatcatgccgaccgtctgagaaagcgtcagcttcggggtgcccgcctgttcaaagcccattttaccgagaagagagtcgaaaccggcccggtgcaggagcccggatacaatgctgctgacccattttccgacccagatgccggcgatgatcagcacaataccgatgatgatattagggagcattgtgaagaccgtgtgcagcatggctgacgccggttcagaaatacccgccacatcaagccggtcaagcgcagagatgatcaccggaatgaaaatcagcacgtagacaatcgttccgatgattgccgacaggctcgtatccttcagataaatagaaagccccatacgtgcggcgagcctttccgttccgatactcgccagaaagtttgtgacgatatcacggacgagacgggcaacaagccagccgattaaaacaatcagcgccgcggcgaataatttcggtataaaggacaaaacgctttgaatcatatttgtaaacggccctgacactccgctgatctggagagcggacaagacgccgggcaggaacaagagcaagacgaagtaaaaaacgattcgtgaagcggccgtaacggatctgctcatctccgcttcttcagacaccattgtccattttctgagccggccgttttcagcgagtttcatgcccgcttttttgacgagatagctgaaaagcgaagcggccgcccagcccacgagcagaatcaagccggcttttaaaacgctcggcacagccgccgttatcgccgacagcatgctgacaaaaggcgaagccacggttgtcagatgcagaatgttaaagaatagaataaaaacgatgattaatgcgataaaataaatgactttactgatgactttttctgaggaatagcgcgccggctttttttcggcgaacagcctgtcgtcgatttttgttttttgcaggcctttgtatacggctttttcaatgattttggcaatgccccagccgataagcaggacgagcagtgcaatgatcagattcgggagtttgctgagatacgtcgtaagcatgtctgctgtattcaagtagaatcgctccttttctttttggggtatggtgtgtgttttacccacttacatataaagcaaacagggcggatgtgccgaaagttttcagtcggaaaccggtctgttatttcatcttttgagaggaggggtcatacattataaataagtccaagtaggggggattcgcttgaacgcggaggagacaaaaggtttacagcgggcaattgaggaaataaccgacattgcaaagggtttcggccttgatttctacccgatgagatatgaaatttgcccggctgaaattatttatacattcggcgcgtacggcatgccgacgagattcagccactggagtttcggcaaacaatttcataagatgaaactccattatgatctcggtttgagcaaaatttatgaacttgtcattaattccaacccttgctacgcttttttgctggacagcaattcgctgatccaaaataaattaattgtagcccatgttcttgcccattgtgattttttcaaaaataactgccgctttcaaaatacgaaccgggacatggttgagagtatggcggctgcggcggagcggattaagcattatgaaagaattcacgggataaaagaggtggagtcctttttagatgccattctggcgattcaggagcatatcgatccgtcgctcgtcaggccgaagctgctgtggagcgtcgatgacgaagaggaggacgaagaagaaaccgcgccatcgccttacgatgatttatggggaatggataagccgaaacaggtgaaaaagaaaagagggaaaaaaccgtttccgccccgtccggaaaaagatattctgctgtttatcgaggaacattcgcgggagcttgaaccgtggcagcgtgacattttaaccatgatgagagaagaaatgctgtatttctggcctcagctggaaacgaaaatcatgaacgaaggctgggcatcctattggcatcagcggattatccgcgagcttgacctgacttcagatgaagccatcgaatttgcgaagctgaacgcaggcgtcgttcagccgtcaaaaacgggaatcaacccgtattatttagggctgaaaatttttgaagacatcgaagagcgttatgacaacccgacagatgaaatgaaaaaaacaggggtaaagcccggttccggccgcgagaaaatgtttgaggtcagggaaattgaatcggacatatcatttatccgcaattatttgacgaaagatctcgttatgcgtgaggatttgtatttattccaaaagcagggcagggactataaagtgatcgacaaagaatggaaggccgtgcgcgaccagctcgtgaacatgcgggtcaacgggggatttccttatctgaccgtcaatgacggggattacctgaagaataatgagctttatattaaacattggtatgagggaattgagcttgatctgaaatatttggagaaagtgctgccgtatctgtaccagctgtggggcaggagcgtgcacatcgaatctgttcttgaagacagagaagtgatgttttcgtatgacggcaaaggagtgcaccggagatatttgtaaaagaagaaaggatgcggggaaatccccgcatccttttttattttccgtgtttcaggatgtgaaagatctttttggcctggtccgtgttgtttaaaagccccgtaaatgactctcttcccggaccgtatgcgtaaacgggaacttcttcgcccgtatgatcgccggttgtccagccgctgtttgttttcgcattaaaaagcttaatgatcgctttgtagacgctcttgtcagcatcctgttttgcggccgtttcgatctgtttaatttccgcttttgaccatttcaggtctgtataacgcgcaagcacggaagatacggatttgcccgctttgatttggtcagccataaatgccggggtttttttggcggcaagaatcggttcaacatgccagtttttatcgtcattcgcgccgatcgtcaatccgccggtggtatgatcagccgtggcaacgacaagcgtatgtttgtcctttttggcaaatgcgatcgctgctttatacgctttttcaaaatccttcatttcactcattgcgccgactatatcattgtcatgtcccgcccagtctatttggcttccttcgaccattaagaagaacccttttttatttttgttcagcctgtcgatcgccgccgttgtcatgtcttctaatgaagggacagcgtttgaccggtcgattgctttgtcgagtccgccatcggcaaacaggccgagaatcttcttgttacggtcctttttcagctcctgttttgatgtcacgtagctgtatcccgcttttttgaaatcctttgttacattgcggtctttacggataaagtttgatttgccgcctccgaggagcacatcgactttttgttttccgttgatgcggtcatcaaagtagctgcttgcgatctcatccatgttctttcgggatttgttatgggctccgaatgccgcaggggtggcgtgggcaatctccgaagttgcgacaagtccggtggatttccctctttgtttcgcttcttcgaggacggatttgacccgctttccttttttatcgactccgatcgccgcgttatacgttttcacgcccgtggccattgccgtgccagccgccgcggaatcggtaatattggaatcaggatcgtcaggataagtcatcatcataccggcgagattggggtcgaatgccgtcagtttcataccatccgaaggctttcctttgttaatgaccgaacggtaggcgttcatatagggtgcgcccattccgtcgccgaccatgaagatgacgtttctgatctcgtttttgtcaggctgtttttttgccgcagcctgttcagagtgctgaaaccccgcgcccgcaatcagaccggctgtcagcacggatacggctgccgccggcagaagttttgatcgaacctgtttaaatagactcattctcactcgtcctcctttaatcgtgtctgcatgtctaatggtagggggtgtttgtaaagagcgcctgttcctcctgtaaatttcaggtgaaacattgttagaaatgtaaattccggtgtaacttatgttttcaagaaagagtgaaaaccattcacttttttgaaaaagacgaggatttttttaacaaggagttatttggaaagtaaactgctttgtttttccaaaatacgaggatcacaggaaaaaaacatgacaaattgactcgtttttcgtcacgtttgaaatcaaattgaaatatttaatacccttaaaaacttttttcaaaaacgaattagtaagaaatttgtcacgggaagtcaagtctatttctagtggaaattgaaccttataataggaaacagataaaaactttaaaaaagagacacataaaatagatagaatcattcagggaggaaaatatgaaaaagcaacttgttacagcaacaacggcagtggttttggggacgactttgtttgcgggcgcggcgtctgcgcaaacgattaaggtaaaaaaaggcgatacattatggggactttcaaatcggtatggaacgtcaattaattccattaaatctgagaacaaattaaaatcggatatcatttacatcggtcagacgctttcgatcaacggtaaatcatcttcaggttcaaattcgggcagcaagtcatcatcgtctacatataaagtcgtaaaaggcgacagcctttggaaaattgcgaataaatataaaatgacggtaaaccaattaaaaagtttaaacggtttaaaaacggacctgatccgcatcggacaagtgcttaaagtaaaaggatcaacttccggttcagcgtcttcaggatcttcgtcatcaaagaagccttcatccagccataatattgcacagacgagcctgaatgtaaacaagctggtttctgatgcgcaatctttaatcggcacgccgtatgtatggggcggaacaacgacttccggctttgactgcagcggatttatctggtacctgttaaacaaacagacgagtgtcggcagaacaagcactgcgggatactggagctcaatgaagagcgtatccagcccgtcaagaggagacttcgtcttctttacaacatatcaagccggtccttcacacatgggtgtatacatcggaaacaacaagttcatccatgccggttctgacggcgtcacaacaagtgatctgaataacagctactggaaaccgcgctacctgggcgcgaaaagattctagcagtgagagaaacccgttcatccgaacgggttttttatttagacggggcagagctccatttgtttcacctaaaaatgaaaatgtgataaaaaatctaaaaaggttttctttttttcattttcatagagggcgatggcgtacgcgcccgcgctcggcatctgggcgaattcgcacggaatttcaatcatgctgcctgcggcgagttcggaccgtaccgctgacagcggcagaaatgagacgcccagcccctctttaataaatcgtttcgtaatatgcgtctgtgtcaccttcattgtcctgacgaaagggaactgtattctgacctggcggagcaaatcatcccaatagtcaggatggttatgggtcaaaagcagatattgtccgaacaggtctttcacttcatccgccttccctgtcccgggttttcggccgggtggcgcgacgaggacaacggggtcattgtacagggggaggcaagtgagggaagatgattgcacctttaagcagctcagtccgatatcggctgagccgtttctgatttgagaggcgatttcttccgattcgaaaatggtgaccgtcatttcggtttctttattgtcctctgtataacgcttcatgacagacgggagaacggtgtcggcgataagcggcgaaacagcgagtgtcagcgtgtgcgagtagccctggcgcaccctgtgcagctccgccatgctgttttcatagtcttccaaaagtctcatggcaaacggcacgtatgcttttccttcttccgtcaattgtattttccggccgctccgctgaaacagcttgcagctgatttctttctctaataattttatatgaacggtgacggtcggctgagataaaaaaagcgtttccgccgtttttctgaaattctcgtattttgccgcggtgacgaaggtgtgaagccatttaaaatccatagatgcactcctctgattaaaagttttaattaattcccttaaaaatattcattattttttaaatattatatttactataataacagaaagaggataagggggaatgaaattgatttatcgtggattgaaagggattacttgtgcagaaacggcgatcagccacattgacggagaaaaggggcatttaatatatcgcggctatgacgcgaaggatatcgcattgcaattcagttttgaagaagcggcgtatctcattttgaacggggcgcttcctgatgagcggcaattgcttgcgtttcaggaagaacttgcagccgagcgcgggcttccgaaacatttgatcggcttactggaaacgcttccggatgaaatggacgacatggcggtgctgagaacggctgtttcaggtttgggcacagattcatttacatatccgcccaagccggaagaagcgattaaactgattgccgtcacaccgacgattattgcgtacagataccgccgtaaacaagggcaggaagcgctgtcacccgaggcgcgatacggacacgttgaaaactatttgtatatgctgacaggcaggcagccgtccgcagcccaaaagaaagcgcttgagacgtatatgattctggcgatggaacacgggatgaatgcatcgactttttcagcgagagtcacggtttcgactgaatcggacttagtgtctgccgtcactgccgcactgggtacgatgaaagggccgctgcacggaggcgcgccttcaggcgtcacgaaaatgcttgaagacatcggggaaaaagaaaatgcagaagcgtatttgacagcgaagcttatgaggggagaacgcctgatgggcttcgggcacagggtgtacaaaacgaaagacccgcgggcggaagcgctgcgcataaaggctgaagaagtggcgggaaatgatccgtcgcttgacttggcgctttatgtggagaaggaagccatccgcttgttagagcaatataagcccggacggaagctgtatacgaatgtggagttttacgcagcggctgtgatgcaggccattgatgtcgacaatgatttatttacgccgaccttttcagcaagcagaatggcaggctggtgcgcacatgtgcttgaacagtccgctgacaacatgatttacagaccgtctgcgaaatacaccggcgcttttcccgaaacggctcagcagctttaattaccggcatatttgtccgtttaactccccgcactgcgtggtatcgtctcagtaataccaattgcaggagtgtgagaatatgaatccgatggacagacagacggaaggacaaaagccgcaggtgcaaaaccgccagcccggcattgagtcagacatggagccaaaaccgctcttggaggatccggatgtaaaagggtcgggcagattaaaaggaaaagtcgccgttattacgggcggagacagcggcatcggcgcagcggctgcgatcgcttacgcgaaggaaggggcggatcttgccatcctgtacctagacgaacatgccgatgccgagagaacgaaaaagcgtgcgagagaataccaggccgattgcctgttaattccgggagacgtcggtgatgaggcgcattgtcagaaggcggtccagcaagtcttagatcactacggaaaaatagatattctcgttaataatgcggctgagcagcatccgcaaaacgggattcttgatattacggctgaacagctggagaagacattccgtacaaacatgttttccatgtttcatatgacaaaagccgtgctgcctcatctcaaaagagggagcgccatcattaatacaacgtcgattaccgcttatcagggagacacatcattgatcgactattcgtgcacgaaaggcggcatcgtttcctttacgcgttcaatggcgatgtcattggccgatcaggggatcagagtaaatgcggtggcacccgggccgatctggaccgccctgattccggcaacgtttactgaagaaaaggtggaaaagcacggtctggacactccgatgggaagaccaggacagcctgcggaacacgcaggagcttatgtgcttctggcttcagacgaatcttcctatatgactgggcagaccattcacgtaaatggaggcaggtttatttcaacataataagcaagtcttatcccgcgcttttaaaaagggcgggatttttatttgattacatatgaatacgatttttaaaaaatagaagccgccagctgaattactaatgttaatatttaacagcggagaatccgctgagttctgttttatgaaaactgaaataatatatagaattttcaaaaaagttattttcatttttatatttttcgctataatatggtgtaggagaaaggaatgatgtgctgaaacatttcatgcgaaaaataagaatttagtcattattgctattgttgtctgaatattctaacatatattgatttacaaggagtgaagcagatgaaggggagcatattcagaaagaaaagcattcaggacctgcttgccgcaacgggcggggaaaagtcgctgaaaagagagttaggggcctttgatttgacacttctggggataggggccatcatcggaacgggaatttttgtattaaccggaacaggcgctgtcacggcggggccggggctgaccgtttcatttgtcatcgccgctcttgcgtgtttatttgcggctttgtcatatgccgaatttgcttcaagcgtcccggtttccggttccgtctacacgtttacttatgcgacactgggtgaacttctcgcatttatcatcggatgggatttaatcttggaatatatgctcgccgtcagcgcggtttcggtcggctggtccggctattttcaatcattcttggcgggcttcggcattcatcttccgaccgcattaacggccgcgccgggatccattaaaggcacggtcacattctttaatctccccgcatttgttatcgtgcttgcgattacattcctcctctacttaggcattaaggaatcgaagcgggtcaataatattatggtcattttgaaggttctggttgttctattgtttatcgccgttgcggccgtatatgtcaaacctcacaactggcagccgtttataccgatggggttcggcggtgttttcagtgccgcggcgctcgttttcttctcttttatcggttttgacgccgtctcttccgccgctgaagaaacgaaaaatccggcgaaggatctgccgaaaggaattatcttttcattaatcgtctgcaccgtgctgtatgtgaccgtatcggcgattatgacgggcgtcgttccgtttgcccgctttgaaggcgttgaccatcccgtgtctctcgtcctgcagatggccggacagaattgggtggccgggattattgatatcggtgcagtgttgggaatgacaacggtgatgctcgtcatgctgtacggccagacgagggtgatgtttgccatgtcccgtgacggtttggtgccgggggcgctttcaaaagtccatccgaagcataaaacgccgcacgtggtgacatgggtgttcggcatcctgtcggcattactcggctcgctcgtcccgcttgatgagctggcgaagctggtgaacatcggcacgcttgccgcgtttgtcctgatttcagtggcggttatcgtattgagaaagaaacagcctgatctgccgagagcttttaaatgtccgggggttccctttattccgatattgtccattctgttctgcgtatttttgattattaaccttggcgccaccaccatattccgtttctttatctggctgatcatcggtctggtgatttatttcttatattcgagaaagcattcgaaattaaacggggatttgtaaggagcggcacccgccgctcctttttatttttcggaataatgaaacatattgaaatgggcttaagttatcgcagtgaataagggataatatagggcggaagggaagtggaaagtcgtgtctgaccaaaaaagggttcaatgggcctcaaaaataggatttattatggccgctgccggttcggcgatcggcctgggagccatttggaagttcccttacgtagcgggtacgaacggaggaggcgctttttttcttgtattcgtcctctttaccgtgcttttaggctatccgcttttgctcggtgaatttattttcggaagacggagccagacaaatgcgattgatgcctacaaacaagccgcgccgaagtcggtatggcacctcacgggttatgtgggtgtggcggcctgttttttagttttgtctttttacagtgttgtcggcgggtggattttgctttatgtgttaaaagctgttacgggttctttatccgggctcactcaggagcagtacggaacggtgttcgggacggtcattgaaaatccgatccagactctcgccgcgcagcttgtatttatgatcttgacagtggcggtcgtcgcaaaaggcgtgcagaaagggattgaacgtgtcagtgcggtgctgatgccggttttattcgtgctgtttctattgctggtgctgcgatcagtcacgctcgatcatgccgttgaggggattagatttttattggttccgcactttgaagatttgacgccggaatccatcctatatgctttaggacaggcgttctttacattaacgctcggcgtttcggtcatggtgacatacagttcgtatctgccgaaaacccaaaaccttccgggatcggcgggttccattgttgtgatgaatgtgctcgtcacgctgtttgcgggactggccatttttccggcggttttttcgttcggatttaaaccggatgaagggcctacactgctgtttaccgtactgccggctgtgtttgaccggctgccgttcggctcgctgttttttatcagctttctggcggtctttttctttgccgcgctgacttcggccttttcgatggtggaaattatcgtagcgactgtcgggaaaggtgatgaaacgaaaaggaagaagctgtcgtggacaagcggtctgctcattttcttagtcggaattccgtcgtgtttatcatacggtgtgctcggtgatgttcatttgttcggaaaaacgttttttgatctagcggatttcacagtgagcaatgtgctgattccgctcggcgctttattaatatcaatcttcatcccgctgaaaataccgaagcgggagctgttcgccgagatgaaaagcggttccgccatcggctatcgtttctttcaggtgtggtatttccttctgaaatacctcgtgccgctggctatcatcgtcgtattgctgcatttaatcggcgttctttcattttaaaaaaacaggcccctgtaaaagggcctgtttttatgtttaaaaaccgaattgcagattcgtatcaacggcaacgatcgtatatacacaaacaatgacgaaaaggttgaggatgacaccgagcagtcccgggcccgtccgtccttttttaataaacagctcaatgatgccgaacggcacggcggccatcgcaaacggcagcatctgataagaatagaaagtcacattgctgatgattgccacgttcaaaagcagcagcgacaaaatcgcggtaccgactgatatccagccgaaaacattatgctctttaaaaattcttaccaattccataattccacctcaccgatgtttgctgcttttactgttttatttttcagcagacgttcgatttcttttgtcggccccgtcacgacagagccgtatacgttcattccgtgatgttcaacatagtcgattcggctgccaagattcatgtctttgcgtttcgatattgcatgcgcccattttttatggcgggacataaattcaagggcattgataaattgttcacggtctgtctgtccttgcgtttcgaaagaggacaccatcttggaatctttcccgggaaatcctaacggctcggcataaggactgtctttcagatttttctccgtttcgaccgcgttccataaaaacttcacatcgtattttttaaaagtagaatatacttgagaagaaggataggcccggtcataagaaagatagacctccgccacgcttccttcaggcaatttttttaatgtctgtccggctttgtcaatcgtgcgttcctttaagccggaaggatgggcaaaataatgctttgcctgtgccgcgtctagatcatagtagttaacggcaggcgatttgaccgtatctaaaaacatttcaatccgttctccgccgacggatttcgtttttgtgccgatctgcttttgcagcggaaactctgtattcatcccaaacagcttcacctggcttttcagtccggaggtatcgacgagtacgttcggcatggtggtcgccaccgtcacggctgcggtttccattaattgattgccggtgctttcttttcctcccaaaccgtaatagaggtagcttcccaaagtgcaaagcggcaaaatcatcaaggtggagatgacggcgagaactgaaatccgcaaatacgatttgcgttttccgtatgacaaaatggccttctgtttttccgggctgatgccgacgtcccattcccggtcgtcctgcatttcgctttcaatcaactcctgatagacttcaagcttttccagctcttcttcaaaggcggccatttcccggtcgctcatttctccatttttgtattggtaaaaacgctttttaaattcttcattcatcattaacacctctattataaagtgctttcagccgctgtctggcacgaaataaaacacttttaaaattagcctctgaaatattcataatatgggatgcttctttgtaattcagttcttttaaataatacagtgttaaggcctcccgataattgtcgggaagttcggacatataccctgtcagcacttccttgatttcaatctgatgagccgggctttgaacagccgtctgaaaaaggctcccaattaagtcatcggaaatggtcacttcctttttatgttttctgacataatctataaacgcatttctcgccacttgaaaaagccatggctttactttgctgtggtcgtaggagtgaatgtgtatgtatgccctcataaaggtttcctgcagcaaatcttcagcgagatgcttgtcttttgtcatggagagcaggaaccggtaaacatcattcatatacatttggtaaatttcatcgatcgtcactgccttttctcccctctatgttatacacgcataagaaaggtttaaagttgcacgttccatgcaaacggcttaaattcattttcacctcatcaaacaccatttctctatagtacccaaaatccgtcataaaagatagagatcggcggaggaaaaatatatttattagtaccaggtaataaaaaatattgttataatagagagagaacacttttgatcattacaacaaaggaagtgcgttatgtataagttttgtgcaaatgccatcaaattcattctttctctgcgcggaggagtcaaagtatacaataaagagaatcttccgtctgataaaggattcgttatcgcgtgcacgcatgcgggctgggtggacgtcctcacgctcggtgtcgggatattgccccatcagattcattatatggcgaaaaaagagctgtttcagaaaaagtggatcggaagttttttaaagaagattcacgcgtttccggttgatcgtgaaaatccgggtccgagcagcattaaaacgccgattaagcttctgaaggaagggaagattgtagggatttttccgagcggcacgagaacttctgaagacgtcccgctgaaaagaggggccgtgaccatcgcccaaatggggaaagcgccgctcgttccggccgcatataaagggccgtctacgggaaaagcgctgtttaaaaagggaaaaatgcggcttatcatcggcgagccgatttttttggaggacttttccgatcttgcgccgaaggagaggcttgcggccatgacagaagagctgaatgccagaattaaagagcttgagaaaaaacttgaacaactgtaaatgaaaaaaagcttgccgtctgtatcagacgcgcaagcttttttgttatgcttctttttgttcggcagtttccagcagttcatcaaacgccagttttttcacttcgatatatgcgacgtggtggccgtcaatttcattaatgataaattcgcagccttcttcgataatcgagtcgtattgttcgacgtcgtatttctgggtaaggaaccagccgccgatggtgtcgacctcgtcattttccaaatggatgccgaggagttcgttcacttgatcaatcaggaccttgccgtcaagcatgtaatggccgtcgccgagtttgcggatttcattgatttcatcgatatcaaattcatcacggatttccccgacgatttcttcaataatgtcttcaacggtgacaagccccgcggttccgccgtattcatccgacagaatcgccatatgaacccgttccttctgcatttttacaagcagatcgtgaatcggtgccgactcaatcacatggatgatcggattgacaaaatccgtaatcggcgagtcgactgatacttcgccgctgatgcaggcggtcagcacttctttaatgttaataacgccgataatattatctttgtcaccctcttcgacagggtaccgggtatatttttcaatctgaatgatatccatcatttcagaaattttgatatcatgcggcagactgacgatttccgtacgcggaatcatgatttcttttgcaagtctgtcgtcaaattcaaagattttgttcacatatttaaattcagactggttgatttcaccgcttttatagctttccgataaaatgatgcgcagctcttcttcagagtgggcaagctcattttcagacaccgtctccagaccgaacgtcttcgttaaaagacgggcggagttgttcagaagccagataaacgggaacatgatgcggtaaaaccaaatgagcggtttcgaaaacagcattgaaacggcttccgctttctggatggcgactgttttcggcgccaattctcccacgaccacgtgtaagaatgtaatgatcgcgtaggcgagaataaatgaaataatatgcgataatgagcttggtacgtttatctttgtgaaaagcgggtgaagcaagcgttcaatcgttgattcgcctaagacaccaagaccgatggaagtcaatgttatgccgagctggcacgccgataaatactcatctaaatgcgtggtcacttttttgacaccgattgcggctttatttccttctgctataagctggtcaacccgtgagcctctgattctgattatcgcaaactcagatgctacgaaaaatgccgtcagcgcgattaaaaccgcgactaaaatcaaattcacaatgtccaattagaaccttcactccttttgggaagatgaaggtaacacctcctgttagtaagataatggtttaacttaacagcagcataaatgattgaagcactgcaagcttttcaggagccagcctttttttcagctgggcgcgctcctctggttcaagcttttcaaaccgattcaagatcccggagatgttttgattcatgtgatcaatttccgatgccagatttccaacatcgtcaggcagggctgaagagggaaactggttctccagtcgatcttttatatcagacagggccaatcgctgctttttacaagcgactataaactttaaccgattaagtgcaagtgtatcgtagtaacgatagttcgaacaagacctgtcaggctttaaaagcccgaggtttgtgtagtaatccaccgtgcgtttcgttacaccggcaagctctgctaattcactgatgcgataagtctcagccccatctaaatccctccccaaccatcacgttatagttatgagaatagtttaatatatgaaggggagtttgcacaagtttattgttttccgtctttctcctgaaacggggcggcaggctgtctgaaaaagcgttgactgcgccatgtaaatctttcataatcattgtaaatagaaacggcagaaaaagacagaagggacagatgacagtggccggtttatcaagggaagtgacacagaacctggagaaaggttcatggatacgcaaactatttgatgaaggcgctcggctgaaaaaagagttcggcgccgataaggtgtttgacttttcaataggaaatccggttgcggagccgcctgaaacgtttaaaaaggcgctttgcgaagcggctgaaacagggcggcacggatacatacaaaaccaagggcttccggaggcgagagaaaaggttgcccgctttttgtcagagcggtttcagaccgagatttccgccaggcatacagttatgacggtcggagccggcggggcgctgaatgtcgcgctgaagagcattttaaacccggaggaagaagtcatccttctttcgccttattttgcggaatataaagcgtatgttgaaaattaccgcggcagacccgtcatctgcccgctgactgactcatttgagattgatattgaagcggttaaaggtgcgatcacaccccgtacgaaaggactgatcgttaatacgccgcataatccgacggggactgtgctcagccagaaaaaccttaacgaattaggcgccttattaaaagaagccgaagagcggaacggccaaagcatatttattttatttgatgaaccgtacagccagctgatctacggagaagagcaggcgaatccgtttcaggcgtatcaccgcgtgattttagtcagttcgttcagtaaagatctcggcattgcgggggaaaggctcgggtatatcgcggcggacgcccaaatgcctgagggcgatcttctgacggatgcgttcgttttctgcaaccggacgctcggctttgtgaacgctccggtcatgatgcagcgcgccgtggcgaaaatggatgatctttcgattgacgctgaaccttacagaaagcggagagaccttatggtggacatcctcacagaagccggcttcgaatttgaaatgccgaaaggaggctttttcgtctttccgaaatcaccgattgaagacgaggtggcgttctgtatgcatgccgcacagaaatacagactattgatcgtacccggcagcggatttggaaaaagcggctatttccgattatctttcagcgtgccttcggaacagatcagacagtcgcgcgatattttcaaagcactgtatcaagatttttcttcatagcttccaacacataaagatgggagaacggacaaatgtcgaggagaaataatggcacatcagacatcagcattacaggaatcggagtcttaaccgcggtcggacaaggcaaggaggcgtttctcgatgcgctcatggaggggcggcacgcctttgatgtgatgaaacgtcccggccggcagaaaggcagttcgtttatcggcgcggagcttagcgaattaacgccgccggacgcgctgtcgaagcgcttgtaccgaagggccgcattatcaggaaagacggcgcttatcgctttatatgaagcgtggcatgacgctcaattagacggcgctgatcacagccgcaccggtctgatcatcggcgggtcgaatatgacgcagcgcgaattgctgcaggcctttgagaaaaacggtgaaacgccgcaatttgtaaatccgacatacgggctttcttttatggatagtgatttgtcggggctttgcacggagcaattcgggataaaagggccggcctttacggtcggcggcgcgtcggcaagcggccaggcggcggttatccaggctgctcaaggaattaaaggaggcctgtttgaccggtgcatcgtgatcggggcgctggccgatctgtcgtacatggagtgtcacgctctccgttctttgggagcgatgggcactgatacatacgctgaacggcctgaagccgcctgccgcccgtttgaccggcatacggacgggtttatattcggagaggcgtgcggggcgattgtgctggagcgcgctgaatctgccgaagagaggggcgcacgatcgtgggccggcttaaagggctgggggatggcttccgatgcgaaccgcaacccgaatccttcagcagagggcgaaatgacggtgatccgccaggcgctggagcgggccggtctttcagcgaaagagatcgattacatcaacccgcacggcaccggttcgccgatcggagataagactgaatgccgggcgctttctgaaagcggcctgtcgcacgcgcggattaatgcgacaaaatcgattaccggacacggtctgagtgcggccggaacggtggaaatcattgctgttctcttgcaaatgcgggaaaacaagcttcatccgatccgaaacttaacggagccgattgacgattcatttcagtgggtgaccgacgggccgagcgcccataccgtacaccatgcgttaagcttaagcatgggattcgggggattaatacggcgctttgtttagaaaatcatttccgaagcagataacggcagccttctttttgaaggctgtttttatatgatgaaaaatctgaaaatgatgaaagaatggagttgtgatacaataaactatacaaatgacaatcatgctttgacttaggaggtggcaggatggggccctctgtgtagtcaatcacccatttcgttcctctcgcttaagaaaaaacgatgaaatcaggaggtgacgtccttatccttcaattcgggataaggtgaaatggacgatattgacagtttgattttaatcggtgtgctcattgcgttaacggcatttttcgtggcgagtgaatttgcgatcgtcagagtgaggagatccagaatcgatcagctcatctcagaaggaaacagacgggcggtgctcgcaaagcgtatcattacggatcttgatgagtatttatccgcctcgcagcttggcattacactcacatccatcgggctcggcgtactgggagagcctgcatttgagcggatgcttcatcctgtgtttcagggtatggggctgccggattctgccgagcatgtgattgcttttgctgcggcgtacgggctgattacgtttttacatgtcgtcgtcggtgagcttgcgcctaaaacggttgcgattcaaaaagcggaaaagctgacgttatggattgccggaccgcttcggttattttacgtgttcatgttcccgtttatttgggtgctgaacggctccgcgagaattctgaccggtttggccggattaaagccggcatctgagcatgaaggctcccactctgaagaagagctgcggatcctgctgtcagaaagtttaaaaaacggagaaatcaatccgtctgaatatacatttgtgaataaaatttttgattttgataatcggatcgccaaggaaatcatgatcccgagaaaagaaatcgcggctgtttccactgatatggacgtgccggaaatgcttgatatgatgctgaaagacaaatatacgcgctggcccgtaacggacggggacaaagacagtgtcatcggcatgatcaatacgaagcatctcttttcagatctgctgtttatgacagaagatgaaaaagcggaagtatccatcatgtcttacgtccgcccggtgattgaagtcatcgagacgatcccgatacacgacctgctgataaaaatgcagagagaacggattcatttggcgatattgtctgatgaatacggcggaacgtccggtcttgtgacgaccgaagacatacttgaagaaatcgtcggcgatatcagagacgaatttgatgaggacgaacagccgcagattcaaaagctgtccgaacgccattatgtgctggacggaaaggttcggatcgatcaggtgaatcatcttctcggcgcagagattgaagaggaagtcgacacgatcggcggtcttgtgctgaaacggaatattgacatttgtgcgggtgagtcgatacaaatcgggggatacactgccctcatattagaaatggacggccggtttattaaacagcttgaactcaaagaagaacagggccgcccgggcggtcaggggacaataaaccgcccgctgcccgtgccggaaacggtcatgcttcataacgcaaccttgagcgaaaaataagctcaaggtttttttaaatggatatcataacaaagccgcaccagaacgccaaaaggcttccggctgctgaaacagcgatgtagagcaggctttcctttatgcggttgttcatcatcagctgcacggcttcaatactgaaggtggaaaaggtcgtaaacgcaccgaaaaagcccgtcgcgatgatgacgccggcagaaggattatccagacccaagccggtgaatatgccgaggctgaaggagccgagcaggttgaccgcagccattccaagcggaatcggaaaaccttttgttctttctgaaattgtcttacccagcagagaccgtaataccgctccgatacccgccgcgataagcatcaggacaatcgtcatggcgtatcatgcccccttccggctgcgtgaagggcaatccgccgtcccaaaaaaatgccggcgtatgcaagagcaagaccagcgaataaagtcgcggcagcataacaaaaagccgctgcgggagacgattgcagcagaaaaatggtttcttttgcgaaggttgacatcgtcgtgaaacctccgcaaaaaccggttcctaaaaaggcggtcaaaagagggcgtttagcccgaatgatgaaataacccgtaataagaccgagtaaaaggcttcccgccgcgttttcgaggaaagtggcacccgggaaagttccgctgtgaatgtgcgcgctcatttcaaagcggagcaatgcgccaagcgcgcctccgataaaaattgcgatgtattgtttcatatcagccatccttagaaataatatccggaaaatcagttacaatgccgtcaactgccatcatttgcagcttttcggccgtcttgtgatttctgaccgtccaggcaaatactttcaggccgtgtttgtgagcggtggaaatcaagaaccgattcaggcgggtatatttaatattgacataatttgcggctgatttgtaagcggccagctggcttttggaaaacatcccgaagctgggtcttgcgataattgcagtcggaacggacggatacatgtcgtgaaaggtctgaatcgacttgagactgaatgattgaacgatagggtgaatggaaaaggtaaacctgcttaacagctggccgactgctttttcaagaccgacttgagaaacgtgccctttcagttcaattaaaaatccgatttcagaatgataacgcttcagaacctcttcgagcaggggaatccgctcccctttaaactcagccccataccagctgccggcgtccagagactgcagcttcttcagcgtaaaatcttttacaaaaccggagccgtccgtcgtccggtcgactttgtcatcatggatgacgacaatctggccgtcttttgtgagctggacgtcaagctcaatgaaatcagcgttcatttcggcagcgatatcaaatgccgcaaatgtattttcgggcgcgtaaccggatgcgccgcgatgagcgatggtatacaagcttgtcagctcccctcatgggcatttctgttattatatcagattcgtatatgcacagcgattcaaactggtgaatgtgcaaaacagtatttttttggaataaagatagtgcttttttcggtttacaatccgcagtgatgatttataatggcaaaaaggaggcgagatcatgggaaaagggagattgaaagtggaagaaagaattaaggccgaaaccgatgctgaaatccaaaaagcgactctcctgaaacagacacaatcaaagaagaaatagtgcctgaccctgttgtatctggctgaaagatgaacgaatgtgtgaaaaaccccggctgtgctctgaggccggggtttttcaggctgcctaaagacattaaaacaagctgatgtccgaatgttttagtataatagattttcgacaagacaaaggagcatatgccatgatgacacaatttcagagcttttttactcttgaccatattttgcagatcagtatcagcatcggaattttagcggcttttctcgttttgagaaaactgtttgtcaaatacttttttcagctcatttacaaattggcgaacaagccgaaaaccgacatattcaaacagattgccgtagcgtttgacaagccggccagatggtttttcgtggcgctgggtctgtttttggcgattgagtattcgccgtttttagacgggcagatggacattgtcaaaaaaatgtaccgctctttgatcatagcgctgatcgcctgggggctttgcaatctgacatcggcgtcttcgtttttatttcataaagtcaatcagcgctttgagcttgatatggatgacattttggcgccgtttttatccaaggtgctgcgctttgtcattctcgcgctcagcgtcagtgtgatcgcgcaggaattcaattatgatgtaaacgggttcgtggccggactcggacttggcggcttggccttcgcgcttgcggctaaagatacgatcagcaattttttcggcggcattatcatcattacggaaaagccgtttacgatcggcgactgggtcgagacgtcatctgtgacggggggcgttgaagatatcacattccgaagcacaaggttccgcacggcgcagggggcgcttgttaccgtacccaattcaacgctgtccatggaagccatcacaaactggacgaggatgacgaagcgccaggtcacgttttccgttcgtgtttcttatgcgacgccgattgatcgtttagagcggtgcatcacaaggctcagggaaatgcttcgtgaacatgaaggcgtgcatgatgatacgattatggttaactttgacgtgtttgcggacagctattacaatctgtttttcaacttttacacaaagaccatcgtctgggcggaaagcctggacgtgcggcaggatatcaaccgccggattattgatatttttgctgaggaaggcgtggagttcgcctatccgggccagaatgtattcgtaaaacagaagagccacgatgatccggttcatgtgaaggatcattccggagaaaaagaacgggcataacaggcgccgttcttttttcatgatatgataaaaagaaaaggcggtggaagagtggaagcgtttataacattgatcaatcaggctgaacgtatcctggtgctgacgggagcgggaatgagcacggaatccggcattcccgattttcgttcggcgggcggtatatggaccgaagacacctccagaatggaagcgatgagcagggaatactttgaacgccgtccgcgtgaattctggcctaaattcaaacagctctttcagatgaaaatgagcggaagctatgagccgaatgccggccatacgtatttggcggatcttgaaaagcggggaaagcaggtagacattttcacgcagaacattgacggactgcataagaaagcgggaagcagcagtgtctatgagcttcacggttcaattcagaccgccgcatgcccccgctgcggagcgcgctacgggctttctcatctgctgaaggacgaagtgccggaatgtacggccgaagtcggtgatcatgcggtatgcggcaccgtattaaagacggatgtcgtgctgttcggcgatctcgttcagcattttgaaaccctttatgaaaagcttgataaagctgatcttcttcttgtgatcggcacttcgcttgaagtggcgccggcaaggtttgtccctgaggatgcgggccggattcccggtttgaagcaagtgatcattaaccttgagccgacatattgcgaccatttatttgatcttgtcatccatgagaagatcggtgaatttgcaaaacggatcagcgccgcgacataaaaaaagccggatcctatacagatccggcttttcttattcatggacgggaatcatttgatccgtcagaacatcaaaggagtagccctgggctttcagtttttggatcaggctcggtaaagcgtgcaccgtcgcaggcagatcgtgcattaaaatgacatgcggcctgctcgtatgaacgctttccaaatatgcgagctgattcaatacttccggcacgtaccgcgcgtttttgtacttccagtcttcactgtctatcgtccagtcccagtacacgaatccgtctttttcgagattcttaatctgggcatccgtcaatgagggtttactgccgtaaggcgtgcggacaagatccgtttttactccagtgattgtctcgagcgtatcgcgtccctgctgcatttcgttcagcggtgatgtcggtgtttgataaaacaggtgattatcgtgcgtcacgccgtgcaggcccagcgcgatcccttcctgcttcgctctttgcacggaatgcttataggctttcatccgcggttcaagcataaaaaaagtggcctttgcgccatttgccttcaatacattcaacagctgttcagtatatggagacggcccgtcgtcgaaggttaaatataccgtttttttccctgggtcacgctctttctgcaaatgtttcattaagacgtcgggagaatcatttttcagccgcaggctttctgcttcatcccgaagctgcccgtttgcggtcacggtgacctgtttgttttttgcggcggaagcggaatatcccattatgacgattaccagaagcagtccgcacaaaactgctaaactcgtaagtttaaaagccaatgaaaacagagaaggggaagcaccttcttttgtgttgcgcataacaatctctccagtagcataagtttctgcataatgccgataacagcggaggcttgcgaagtgccataagttaacagcatatgtatgtcgaatcaagtatacaggaacaaaactggaaaagacatagaaaagatgtcgaataataagattttaagaaaaaaataaactccgcagccggctcgttcagtatgatagaatagttgacaataacagctgagaatgcacatcacggcagataacgattaggagggtttacatgaagacattagtaaacggccagttgattgatcgtgaagaagcggcagttgatattgaggaccgcggatatcaattcggtgacggtgtgtatgaggtcatcagagtgtataacggcgccttattcggtctgcgtgagcatatcgcccgtcttttcagaagcgccgcagaaatcggcatcaccctgccgttctccgcagaggacatagaatgggatctgcaaaagctcgtacaggaaaacaaactcattgacggcggggtctatatacagacgacgagagggaaggcgccgcggaagcaccagtatgacgaaggattggagccgcagacgacggcatacaccttttcagtgaaaaaaccggaaaatgaacaaaaagccggagcgcaggccatcacggcggaagacaaacgctggctgaggtgtgacattaagagtctgaatttactgtataatgtgatgataaaacaaaaagcctatgaagcaggcgcttatgaagccgtgctgataagggacggggcggtcacggaaggaacctcatccaatgtatacgccgtcataaacggcaccgtccggacgcatcctgcaaatgagctgattttaaacggcattacgcggatgaaactgttagagctgatgaaagaaaacgggattgaggtgcgggagaaggctcttaccgaagaggaactcagagatgcggatgaaattttcatctcgtcaaccacgtctgaattaatcccgatcgtaacccttgacggaaaaccggtcggaagcggatcgccgggacctgtagccaaaacgattcaggaggcttttcagtcgcacattcagcaggagctcggcgttcagtcataagctgaaaaaaaggccggaacacatccggcctttttgctccagtcagataaaaagagattcgatatgctgaacgagtacacgggagatcttctcttttgaaagacgatcaggttcaagcatggcatgcagcgccaatccgtcggcgatagcgtacattttctccgcttcggtttctttatcaagattcggtttcagaagcttattttcatccagccagtcaatcaggccgcggatatatgccaagatcccgtcctgctggggttgaaactcttctcccttatgtctggcataagctgtgaaagcgaaccacacctccatttcagccatcgtttcttcatctgtcgggataatttcaagcatcagacgcaccgctttttctttcggcggcagatctttcatggcaacttcgttaattctggcggccgctttttcttttacgagtgtcatcgcataccctaaaagctcatcctgggtggtgaaatagtgcctcagcgcgcctaaagaaagacccgcttcttgggcgatgtttctcactgtcgctccttccattccccgctccaaaatcgtccgccaagtggcttcggctatttgttttcttcttttttcatgatcgattattttaggcatggttccagtgtaacaggaaatattttttcttgcaattttgtaatacagttgtattaaataaaaagcagtgatacaatgcattttagaaaacgataagggggaaccggattgaacgcgattgcttggttgattgtcatttgtgaggctgctttttgggcggctgtcatcttcggattggcggcgcgctatatattcaggcggcaaaagctcggaatgttttttttcgctctcattcctatattggatgccgtactgtttctggcggccgcagctgatttatacagaggggcggcggcgactatggcgcatgcagtggcggccgtttatatcggagtgtctgtcgccttcggaaaaagcatgattcagtgggcggatgagcggttccgctattatgtggtaaaggaaggggcaaaaccggtcaagcggtacggactggattatgccaaacattatgcaaaaggatggggaagacatgtattagcatttgtcatcggcggcgttcttttagccggaacggtatttctcattcaggacgcttcccgcaccgaagcgctcagcggactgttaaagggctggtctgtcgtattgtgcatcgattttttgatcatggcgagtttttttgtaatgccgaaaaaaagaaaaaacagccgggagctgtaaaaaaagcagcttttgattaagctgctttacagaaagaattattttacgatcagcacgggaatatcggatttcgatgacagtttttcactgacgcttccgaataaaagttttttcagcctgttctggtcccggctccccatgacgatcaaatccgccgatatacggtcggcatgctcgataatggcatcagcgggatcaccttctaaaatgtcgatatccccgtcaatctggctgtcgttcatcagcattctcgcttccgcaacgatttcttccgtacggtcttcataaatcatcggatcaggggagattctttccgcctgaagcgggtcaggaacgcttgcaatcccgccgccgatatacgttgccccggctcccggcctcgggggatcaacaatcgtctgggtatcttttgcactgtgggaatgtacgaccgttaaatccgcgtggaacgtttttgaaaggtctatggctttttgaagcgcttttttactatcatcacttccgtcaaaagctgctatcaaccggtctgcgtgaaacatcagcctcatcctttcagtaaaaaaggtttgttttacaatacccgtgcggcagaaatgtaaaacccgcattgacaaaaaaaggatttatttatatgatgaaggaacaatataggaaaaaggaggtatggatcatgtcaaaactaaagcttgtcaactcatcttcagctgaataccggcgtgacttccatacagcttccgttttctgaacatttgcttaaaaacggggcagtcgcgcataaacggcgggtctgtaccttatttataataataagaggcatggagctgaggcttcatgtctttttttatacaaaaaaatgaaagaaagacaggtgtgatgcatgtggcggcattagcgaaaacaatgaaaaacaatccggaaaagcttgagggcggctgattgatgaaaggggatgacggtatttgtttactgtattaaaaaagctcgcgtggttttttaaagcctattggctgcgctatacgacagcgattgttctgttattgattgtgaatgtcattgagatgtttccgcctaaacttctcggtaatgcgatagacgatatgaaggcgggcgtgtttacgaaaagcgggatgctgttttacatatgtgtttttctcgcattaacggcagccgtctatttactgtcttatttttggatgtatcagcttttcggcggggcgaatgtcatggagaaaattctccggtcaaagctgatgggaaggcttcttcaaatgtcaccgccgttttacgagaaatacagaacgggcgatttaatggcgcgggggacaaatgacctgcaggccgtcagtatgacgacgggcttcggggtcttaacgctcgttgattcgacgatgtatatgctgacgatatttttgacaatggggcttctcatcagctggaagctgacatttgccgcgattattccgctgccgataatggcggctgcggtcagcctgtacggaaaaaagatccatgagcggtttacggaagcgcaggatgctttcggatcattaaatgacaaggtgctggagtcggtatccggcgtccgggtcatccgggcatttgtgcaggaaaaaaatgatgtcagccggttcggtgatatgacggcggatgtatatgagaaaaatatgaaggtggcgtttatcgattcactttttgaaccgactgtgaaacttctcgtcggcctcagctatctcataggtctcggctacggcgcttatctcgtttttcaaaaccggctgacgctgggagagctggtatcgtttaacgtgtacctcggaatgatgatctggccgatgtttgcgatcggagaattaatcaatatcatgcagcgcggcaatgcctccttggatcgtgtcaatgagacgctttcctatgagcctgacgtgatcgggcccaagcgccccgccggcatcaaggagcccgggcgtcttgtttttgaacaagtgactttcacgtatccgagcggagcgggaccggcggtttccgatgtatctttttccgtagaaaaagggcagacactcggcatcgtcgggaagacgggaagcggaaagacgacgatcattaagcagctgctgcgtgaatatccgcccggtgcgggagaggtcacgtttacaggcgtcccgattcaggagatcccgcttgaggagctccgcgggtggatcggctatgtgccgcaggatcatattttattttctaagactgtaaaggagaatctgctttacggacggcaggatgcaaacgaagaggaaatcggcggcgcgctgaaagatgcgcattttgaaaacgatatcggcatgctttccgacgggcttgagacgcttgtcggcgagaagggcgtagcgctctcgggcggacaaaagcagcgcatctcaattgcgagagcgcttttgaccgatcctgatattctcatattagatgattcgctttctgccgtagacgcgaaaacggaagccgccatcattgacagcatccgtaaaaaacggcggcataaaacaacgattatcaccacccaccggctctcggcagttgaacacgcagatctcattctcgtcatggacgaaggccgggtgtctgaaagaggcacgcaccgggagctattggcgcagaacggctggtatcgaaaacaatatgagaggcagcagctgtcctctcttgaagaaggggggacgggcgcatgaagaccgggagaagattatggaattacgcgcttcaatataagaagctgctgatatgggcggtcgtcctgctcattattgcggtcggcactgagctgaccggcccgtttatcggaaaaaaaatgattgatgaccacattctcggcattgaaaaaacatgggttaaagcctctgcggacgatccgggcgccgtcaggttccgggggcatgattatgtcagggaggaccggctcaaaccgggggcggataaaaccggagaggcgcacatttatcaagtcggtgcgggctactattttgttgaccgtcccgtcagttttgacggaaaccgttcggtgtctgacggccggctgacaatatcaaacggtaaagaaagcaggtcatatcccgtcattacgttatcaagacaggagatttttgaattttaccgtccggaaataaaaggattgctgacgttgaccgccatttatgcgggattgctcatgttttccgtatgttttcattacggtcagcattatctgctgcagatgggagcgaaccggatcatacagcgcatgaggcaggatgtattttcacacattcagaaaatgccgatccgctactttgataatctgcctgccggaaaagtcgtggcccgtattacgaatgacacagaagcggtgagggatttatatgtaacggtgctgtcgacatttatcacaagcggcgtttatatgctcggcatttttacggcgctgtttatgcttgacgtcaggctggccgccgtttgccttctgattattccgattttaatgatctggtcggttgtgtaccgcaaatatgcatccgtcttcaatcaaaaaatccgttccattaacagtgacatcaatgcgaaaatgaacgagtccattcaaggaatgccgattattcaggcgttccgccgcgagaaggaaacgatgaaggaatttgaagaattgaatgaagctcatttccgctacaaaaacaaaatgctgtccttaaattccctcatgtcccacagtcttgtcaatgtgttgcgcaatctggcgtttgtcgggctgatctggtatttcggaggcgcgagtctgagtgcggccggaattgtttcgatcggtgttttatatgcatttgttgattatttaaaccgtttgttccagccggttacggggattgtcaaccaattttcgaagcttgaattggcccgtgtctctgccgccagagtattcgagcttttacaggaggaggaaacggaagaagaaggcgctcccgcagacagaaaggcggaagggacagtggaattccgcgatgtttcttttggatatcgaaagggagaagaggtgctgaaacacatcagctttacagctgaaaaaggggagacggtcgccctcgtcggccatacggggtccggcaaaagctccatcctgaatcttctgttccgtttttatgatgcccaaaaaggggatatcctgctggacggtaaaagcatatacagcatgtcaaggcaggagctgaggtcgcatatgggcattgtgctgcaagacccgtatcttttctcgggcacgatcggctccaatgtgacactcgatgatcagcgtatttctctggagcaggcggaagaagcgcttcgccaagtcggcgccgcaagccttctgcaatctttgccgaagggcatcagagagcccgtcaccgaaaaaggcggcacactgtcctcaggccagcgtcagctgatttcttttgcaagagcgcttgtgttcgatccggccattttaattttggatgaggcgacggcgcacattgacaccgaaacagaagcggtcattcaaaaagcgctgcaagtggttcaagaagggcgcacgacatttattatcgcccatcggctttccacgatcagacacgcagaccagattctcgtgctggaaaagggccgcatcattgaaaagggaagccatgacgaattaatggcgcaaaaggggcagtaccatcaaatgtatgaattacagaaaggaacggcgaaatccgcggtgtaatcggaaagggtgaatcaaaagattcgcccttttttcattcagtaagccagtcctacccgttttctgacaaactgcgggctgatcagctcgcggtacagaaaatgtgccgtgtctccgactgtgatttcggcgccgtcttcaggaaggcgatcctgttcgaaccggtaaactccggcagcgtctccgtcaggaaggtaggtagggcagatgatcgtccagtcaagatcctctgccagcagcatctcgtatacgcgggcgtgttcctttgcggctcttgttgattttcgttttgattctgccgattcaaaacggtattgatcaggcataagccgtgattgaaggatacccgcggtgccgatcgtaatcagacgctgaacatgatgccgtttcatgccgtctattatatgggtcatagcggctgaaagggtatcgtcaccgtccgtgccgagacagctcacgactgtgtccgctttggaaatcaatcggctgacatcttcccgccgcctcgcattccctgttatgatctgtttttcaggaatgggaaggactgttccggctgatctgacaagagcgaatatttccatgtgtccatgtttctgcgcttcttttataaaagcctgtccgactcttcccgttgctccgagtaaagcgatgttcatgtaaaaaacctcctcgccgctcattatatcattcaaagcagcggggaaaagaatgcctgtgaataaacgggaaatggtgggcaacatattcattgaccaaagaaacacttacgaactgaaacagctcccaattgactgaggcaatgaatgacatgttttccctccttttttcctagggtatgtggaataggaaaaaagggtgacggcataaaagaagacgcggtatcccgcgccttctgtaagccatttattgagttattgtacgccttggccgcccatgttctgctgtgcgaaagatactaaacgtttcgtgatttctcctccgacagaaccgtttgcacgagaagttgtttctccgccaaggtttacgccgaactcagaagcaatttcgtatttcatttggtcgattgcttgagcagcgccgggtactaatagttggtttgaagagttgttgtttgccatttgtatgatctcctttattaagtagtatggttgggtttgctggaattgcaccagccgatgattttcggaatgaaaaccattgccagctcggcttcacccaatgctgtttgccgctttgtactacgtattatggtgaatcaaagggcatctcattcggaaaaccgggtggtaaatagcggaagggaaaagaaaagcccagcctgatgcggctgagcttttagctttcagtcatatatgtgataaagcattaattcgtgcagctcttttacgagagccggctcttcttttcccggatgtgtgtgtccccattcaatgtcaccggacttatggtaaaccccttcgtaatgcgtaccctgccagtaaaatgaaatccgccatccgggcagtttctcttttttgaataacggtttccagctgaagtgcgaaatcatgacgttcacgctccttgtaggaaatgttgatcttgttcattgtagctcatcattctgtgcctgtcccgggtaaaaccaaaaaaagacagcctcaccgccaaagtttttccggggcggtgatggaccgttctgataaataggacgcgtattcaaaatttctccgttttgtcaggtaatcgaccgatctcagcttcggatgggaaaaaatgctgcgcccggggcgggaattggcttcaaacatccaaactttccctgaatgatcgacgccgaggtcaaaaccgatttcgccgataaaaccttcaatgtgctcatttaacacgcggctgaccgccaaggcggctttggaaagtttccgcatcatgccgactctctctcgcggatcgccgtataattcagctaacgtcctgacttctccgccggttgccagatgcgtcgtgatgctgttttcaccggaaatttttgctgcaatggccgtcactgtccatttcccctcggcgtttttattcgtgtgcaccctgaaatcgacggggcgtccatccagccggatcaggtcaatgccttgctgaattaaaaatgcggacgggtcattgttttctttaaatgatttcatgaaggatgccgcatctgaatactctgccgtcaccaccgttttttcctcattcgtgtgtttgacagataagccggcatctgttttttccaccctgtaaatccccgttccgagtgcgccgtctgcaggtttgatatagacggtgtcaaatgtgttgcataacgtctctaacgcctctgcattcgggtgcaggacagattttggaagaagtgaagcggtgagactgtttttttccagaagcttatgaatgtcccatttattaaagaattgcggattaaaccacggaatctgatagtcattcatcagcctctgttttgtctgctgtaaaagcggaactccttccgtttttcggctcgggagcctgtcatatacgacattcggaagcgggacggacgtccgtttccagctgttttctttataaatcagcgcttggacggtgccttcttcccagttgatctgatgagctccgaaaacgaaacaatatccgttcgcctgttcatgaagtgagagcatcttggaaaagaaggctgtacggtctcttaacgggcgggacggcgatgatgtgaacccggctgtgaaaacgccgatcagcggtccgatgtgcaccgtctggccgtgtatgagaaagtcagcccggcttttatacggtatcaacagctcctcaaacaaatcttcagaaaggagcgcgcttttttcaagtgattgagaaaaggctacacggcatttgacaaccttggtcccgaaggcagcggataaaagcccttcccgtttcatggaggaggggagaaacagcgtatttttgctttttttatcgatgccgacaatcatccctttatgattcacgcggtaatactcccttcctgctgtcctgtgactgaagttcgcggaagcgtctcagcggacccgtatacaaatcctctttcgcctccggagccacgcttaaaatagctttccgtcccggctttgaattgacatccaaaagccagatgcgtccgtctttggcataacaaatatcgagccccagctcaaacagcggtccgaaccgttcatcaaggaaataaggaacggattgggtgatcgaaaagacatcatccaataaaacggcctgctgctttctcggaatttcctcaaaccatatgtcaaacttaatcggttctgatcctccgggcaaatgagataaaagaccgttctgataaccccttctgaccgcttttccgaccgtttcccaaacgcctgactccgttttgcgcatgaaaatgcggatgtcgcacggatgccgttctttatcctggatatttaagtaggattgaagcaaatagcggtgctgcagcacttttttgcaccaagacttaaaagacacgtgattggaaaatgattttgtttgtttgttttttccgatatagtaagtggcggtaattgattttttgcctgtttcaagcaggatgatgcctctgcctcccgcgccgaaagcgggcttaagtatacatgctttttccttggctaagtataattgcacctgttcatagcggctgacttcggccgtttcaggaatatagggactgatcagatgatgcttttggagcgcatctgtaaccgtccatttatcaggaagcccccgcccgataaattccgttttcggatattttttcagccattcgacgatcggtttggctttttgcgcttcagcggattttccgtaaaaacagcggtcgtaaatatattcgggaatatcgatttccgtttcgttccactttccgctttgcgggtgatagacgagcgctttcacgcgcaaagaatccggaaatatatcaaacggtgtaaagcgggctaagcgcacattatattgaggcgctctttcagccaattccccggcgtaatcttcttcgtgccggcgggatacagacataaaaccgagtgttgtcatattactactccccctttattcaaaaagccgctgatggaacggcccttccatccaataaatatgctaagcgcatcataaaagatgatctactgtaaagagtacgaaacagcatcttgccttattcctcacaaacaacaattcaggttcttcatttgcccgcatgcccgccagcctctataatacgaatagatatatcatcaagaaaatagaacataagatggaggcagaagaaaaggaatgggcatagcaggaacgtttctatttatgatcgtgatcggagccgcgatcggcgcggtgacgaatcatcttgccattcagatgttatttcgtccgtaccggccgtattacctgttcggaaaacgggttccgtttacgccggggctgatcccgaaaagacgggatgaattggcaaaacaaatggggctcatggtgacgaaccaccttttaaccccggaaggaataaaaaagcggcttttatcagataacgttaaaaaccaggcgcttcttttcgccgaacaattcacgcaaaaaatggccgcttccgaaatgacggtgcacgaagctttggccgccgcgggcatccggaatccgcaggaaaagacggatgcctggattgaccgttttaccgatgaaaagctttcggacctgtaccggaaatatgagcaccgcgccatcaaagactggcttcctgatgagctgcaggaaaagctggatgaaaaaatcccgctggccgcagattatatcctgaagcgtagcattgattattttgagagcgaagaagggaaagacagactcggaaatatgattgacgactttttgaattcccgggggatgctcggcggcatggtgcagatgttcctcggcaattcaagcttggcagaccgtgtgctgcctgagctgttaaagtttttgcgcaatgaggaaacgaaaaagcttctggctgatctgctttctcaagaatggggcaagctcaaatcttatacactttatgaggccgatgaaaagtggaatgcgaaagatctgctgttcagcatgaaaaagcgggctttggccgcacttcaaaccgcgccctttttcgaatgccggctcggtgacatcatctcccgttatgaaggggagattacggggacgtacgcgccgaagctgcttgatgcggcactcggcagtattgccgctcatttggaggatgtgctgaaacggctgcgtcttgaggaagtggtcaaagagcaggttgatcagtttcccgttgaacggctggaagaaatggtgctgtcgatttccaagagagaatttaagatgataacgtatttaggcggtctgctcggcgggataatcggagcaattcaggctttgtttgtcattcttttctaaggaaaacatacgccgatgatgaaagtcgctccgcagtctgttatagtggagtggtatgtccgaaaggaagaaaggagcggttactatggcagttcatttttatgatgcagcatatgatcttgaaaaagctttgcgaaacagtgatgaatacagccgtctgagagggctttatgatcaagtaaacgcagatgaatccgcaaaacgcatgtttgataacttccgcaatgtacagatgcagctgcagcagaaacagatgtcaggtgaagaaatcactcaggaagaggtagagcaggcacaaaaaacggttgctctcgtacagcagcatgaattgatttctcagctgatggaagcggaacagcgcatgagcatgctgatcggcgagttaaacaaaatcattatgaaacctcttgaagagctttacggcagcccgcaataagctccacacccctccatctatgaaatggaggggtttttttattcaacagaaaaatcaagcgaaccttttaccgttccgttaatgatgacagacagagtgtgaattccccgataatgcttgcgggtggttaaatctttaagggaatgacgtttgctgaaggcttttacgtttccgttatccatggcggactccgacatcttaaacaccttgcggctgcggtgcccccttttctttacaaaatcaatcgcgtattcaaccctgactttttgccgggcggctgagcggatctgaaaagaaaaatgtatgcttgttccgatggcggccgtttccgaattcagtgtaaaacgttccaatgaaatccgggaggcgtcttcaaacccgaaaatcgcaagcgcctgtttgtctcctctttttaacagtgtcctgcaggcgtgcttcaaaatccaatccgtgtgcggacagcttccgaaccgctcggctgcggtctgtgccagaagatccggatgggttttggagatgtcattcaggttattcgccacgctttttctgacatataacgagtcatcctgcatcaagcggtccagaacagggagaatcggagaaggatcttcaagaagagccggaatggagattccccacggcaggcgcggtcttgagccctcgctggcaagccttctgacatgttcgtccggatgctccgtccaggaaaggaactctttgaacatccgctcccggtcaagcctgatatacgggcggaccgcaaattcggaagtggaaaaacgagtgaaaaactgaagcgccttcattgattcttcccagtgatccgttccgtactgttggacataatcgggaaaaataatcccggcgagccctgtgaaatggggagctgtctcatataagacgtcaagcgcccgtatgtaatccttcggcagtgtttcatataaagagtctgtgatccggcgcatccgctgttttaacgtcagtccgggccaatcttcctgaaatatcagcgcccggcacttgtcccgctcaaaagccggatacgccgatttgactctgtgcagaagtgcttctgcaaattcttcgttataaatatcttttaatagagacatgacagtcaccgctttttttcttttattatatgcgaatatacgttccttttcaattttatcatacattcagcacagatagttcccctgatttttttagttaaaaaaacccttgttttttaacaatattattgagataataactctgaaagcgcctacacttacagatgatctaaggatacggtcgcctatactgcctggtatgttaaggggtagcaacagagagtaagtgaaacgagcgcatcaacggtcaaataaggggttcctgatatatttcgttaatagaaatgcacattggggagaaggcagcaaatcgatcgtatcccaacaaaacgacagttcaaagtctgcttgaggcaggcttttttgctgcggagaaaaggttgttctaaacaaagagacagggtcatatcctaatgacaagtacagtcatcaaggagggggacttctctgtgtcaaaacaaatgctggcgttaaatatagacggagcgcttcttcgctccaacggcaaacttcatcagacgacaaaggatgccatcgaatacgtcaagaaaaaagggatttacgtcacactggtcacaaaccgccattttcgctccgctcaaaaagtggcgaaaatattaaagctgaatgcaaaattgattacccacagcggcgcatacatttctgaaaaaatagatgagccgttttttgaaaagaaaatatcagaagatcacacgtttaatatcgttcaggtgctcgaaagctatcaatgcaatatccggcttcttcacgaaaaatattcgatcggtaacaagaagaaagtgaactccaatctggtcgggaaaacgatgattcatccgtctgacccgatcttttatccggtgcagtttgtcgaatcattaagtgacctgctccttgatgagccggtttcagcgcccgtcattgaagtgcatgctgaagatggcctgcaggctgatataacggatacgataatgaaagcattcccggccgtcgatgtgatccgcgtcaacggagaaaaactgaacatcgtgcctaaaggggtttcaaaagaaagcggactttcgatggtcgccgctgatctcgggctttcaatggaagaggttgtggctatcggccatcaggaagatgatctgccgatgatcgagctggccggtctcggcgtcgcgatggggaatgcttcaaatgaattaaaaagaaaagcggactgggtgacaaggtcaaatgatgaacagggagtggcttatatgattaaggaatatttccgcatgcagcaccgcaaaggctttctcgataagttccatatgaaacggccgtaatcaagagccgcagacgcgaaacgccggtctgcggctttttcgcggattgattttagcctgttctttctgtacactaaagaaagttttgaatctgaaaaataaggtgatcacattgcaaataaaaatagacggcataacggatgacaggctgcatcgtccgctgcaaaacatcgcgaatttattttttgaagagtgtgttcttacgtacggcgaaacggaggaaccctctgatctcgtcatctcacttgccatttctcaagatgcagacagcgtgtcggtatccggagaaatcaaaggaaccggcgaaaaggaacatcacacgaaaccgcttcttgccggatggagcgaaaaagaagtatttaaacaggtgaaaaacacgctgtcatatgtctacttaaatcttcttcaatcacatacgggcatgacacaaaaatggggaatcttaaccggcatcaggcctactaaacttcttcataaaaagctgcagagcggcctgacaaaagaagaggcgcatgccgatctgaaaaaagactatctgatccatgatgaaaaaatcaatctgatgcaggagattgtcgaccgccagctcgctgcggttcccgatctgtaccgggtcaaagatgaagtcagcatttatatcggcatcccgttctgcccgacgaagtgcgcctactgcacgtttccggcttatgccattcaaggacaggcgggaagagtcggctcctttttatgggggcttcactatgaaatgcagaaaatcggagaatggctgaagcggcatgatatcaaagtgacgaccatttatttcggcggcggcacgccgacaagcattaccgctgaagaaatggatcttttatatgaagaaatggtccgctctttcccggatgtcgcgaatatcagggagattaccgttgaagcgggccgtcccgacacgattacggaggaaaagcttgccgttttaaataagtataagattgacagaatcagcatcaacccgcaatcttatgaaaacgaaacgcttaaggctatcggcagacaccataccgttgaagaaaccatcgaaaaataccatctttcccgcaaacacggcatgaataatatcaacatggacctgatcatcggcctgccgggagaagggacggctgagttcaggcacagtcttgaagaaacggaaaagctgatgcctgaatctttgaccgttcatacgctttcttttaaacgggcgtcagaaatgacgagaaacaagcataagtataaagttgccgacagacaggaagtgtcccgcatgatggatgacgccgtccgctggacaaaagagcacggctatacgccgtactacttgtatcggcagaaaaatattctcggaaaccttgaaaatgtcggctactccttcccgggtcaggaaagcatctacaacattatgattatggaagaagtgcagacgattatcggtatcggctgcggggcggcaagcaaattcattcatccggaaaccggaaaaatcacgcacttcgccaatccgaaagacccgaaatcatataatgaccgattcgagcattatacagaagagaaaatcaaatacttagatgagatgttcgtcaaatctgcattataatatcaaaaacggcacggaatcagcgtgccgtttttttatgtttaaccgtctgtaaaaacgggaaaagatcatcagactgttattcgcaagaggtgcataatatgtatgatgtcataggagcgggaatcgggccgtttaatttagggcttgccgcattgttagaggatatacccggaacagacgctctttttttcgataaaaagaaagaatttgcgtggcatcccggtctattaattaaaggaacggatttacaggtggcgtttctggcggacctggtcacgctcgccgatccgaaaagccgctacacgtttttaaactttctccatgaacatgaccggctgtaccggttttatacgtttaatgaatttgatattccgagacgggaatttaacgactatttaagctgggcggcttcagaaatcaaatcatgccgtttcggctcagaggtaatcggcgtgaaaaatgccggcggacattatgaagtcagcgtcaagaacattgaggacggaagcatcagtgtctatcagacgaagcatttcgtcatggggacggggtctgaaccgcttattcccgcagagattgatgacggagcgcgtcaggacacgatggtcagcacggaatatttgttccggaaagacgagctcgccggcgccgaatcaattacagtggtcggctccggacagagcgccgcggagatcttttctgacttattgcatgatgaacaataccggcgcagccggctgcaatgggtgacacgctccgccggatttcgagaattggaaaccgccaagctcgggcaggaaatgtttacacctgattatgtggaatattttaaccgcctgccttttaaagaacggctgaacacactccctgagctggacggactgcgccacggcattgattctgacacacttgccaccatttacgacgccctgtatcacagatcgatcagcggaggttcgcctgacgtgtatattcagccgatggcggagcttgaaaaaattgaaaagcaaaacgggcgctgtgtactgagctttcatcaatggcagatggatgaaacttttacggccgattcagaaaaagtgatattggcgaccggctttaaacctcatattccggaatggtttacggcaatcgccccgatatcgaatgggaggatgagaaacggtttaaagtgacggccgattcccgtcttgtctttaaggacgacagacggcatcattttttcacattaacgaatcttgatcatgctcacggaacgggcgctacgaatttgaagctgtctgtttacagaaaccaaaaaatcatcaataccattctgggaaaagagcatttctccattaataaaaaaacggcttttcagcaatttcttcccgctcaaaaaaactgacctcttatgaagaggtcagtttttttttatgatttctgcggcttcttttcaggcgtcttccatttgaatacgctgttcagcaggagatatatccgcttcgattctttcgtgagcaaagggccgaagatggccagtatcaaaacatataaggcggcgaaaggtttaagtgaagcggacaggccgccggcgatgccgagatttgcgacgataatggagaattcgccgcgggacacaatggtcagcccgatattggacgatgctttatgagaaagccccgcccggcgcccggcgatcatgccggcgataaagtttccggcaatcgtcagcagaacggcgccgagggcgagccataccgcatctccgagtgaaaacggatcaatgctgaggccgaaactgaagaaaaacatggcgccgaaaaagtcacggaacggcacgacaagatgctcaatcctgtcagaatgggccgtctccgaaaacacgagcccgagcaagagcgcgccgatcgcttcagcgacatgaatcgtttcggaaaagccggcaatgaaaaagagcgcggcgaaaatgacgatgacaaatacctcgtttgaacggatatcaagcagcttgttcagcagaggcggcaatttccgggcggcaatgaaaaacagcagcatatatccgaaagcgatcacgattgacatcagcgcgcccccgacagacgtcgcgtctcccagaacaagcccggaaacgacggataagtaaaccgccagaaagatatcctcaaacataatgatgccgagaatcagctccgtttccggattggccgtgcgctttaagtcgacaagcacctttgcgacaatggcgctggatgatatcgtgatgacgcccgccaatacaagcacttccaaaaaggaaaagcccgtgataaatccgtagatcagccctaaactgaaattaatcagaatataaatcgttccgccggcggcgattgaacgtccggatttgactaattttccgactgagaattcaagcccgaggtaaaagaggaggaacaggacgcccatccgtccgaaaaattcaatcacttcccggctttcgataaacgtcagatcaatgatgcccgcctggggcgcgtgcggcccgacaagcattcctaaaatgatcaggaaggggatgatcgagaatttaattttattggcgatgacactcgcaatggccacaagaactaacgccgtaccgacttcaaatacgagatggtccataaacagatcacactccgtctctggagaggaagtcttggatcagttttttcagatgctttctttcacctgagaggacgagtgtatcgtttgcttcaaggagcgaatcagcccccgggtttaaaaactttttctggtcatgctttatgatggcgataaccgtcacgtcatagttttggcgcacatccagttcgccgagcgtccgccctgccgcttttgcccctttttcaactttaaaccattcgataatcagatcgctgaacgccatttcaatcgattcaagcgcctgcggtttgtacaccatcccgccgataatcgcggcaatctgtcttgcttccgcatcatcaagtgaaatgcttgccagaagctcatcagggtcgcggtcatcaaatctgtaaatttcccgcctgccgtcatcatgaatgatgatcgtcattttttcatgatttctcgtttcgatttcgaattttttcccgatgccgggcagatcgttttctttaatattcataaaaaatccctccggaatatactgtttttacaccgtaaatacagattggcaatgagaaatggtctgatgccggaggtaatttgactggtattgtatcggaatggcgcatgtcctttccattgtggaatcaatgaattgatcaagaggtttgacagataacagggagatcatccgggataacgcaccgtatccttttgacaggccttgcggagcggttttggtttgaaccggcgtctttgccgattccgtttcctgcgggtagaccgaaatttgtacatggctgtctgtttctgtcaccaattgggaaggaagagcgacatccgaaggggggaacagcaccataaaaaagctcagtaacaagctgagtatcacatatttcattatcggtgtttttcccccctttttgttttgtatatcaatttcactatataaaaatgtatgttcagtttcaaatgatatgcatttttcggtatctgttgaccttgaaaaataaaggagtttcgcttcgggggaaggaatatatcatttgaacaaaatatgtaagcggattcaaggagggagtaaacatgcagtatattcgttatgaagaaaagggaaagatcgcagagattgtgctgaaccgtcctgacagttacaacgcgctgaatgaacaaatgctccgggaattggaaaatgcatgcgttatggcagccgacagcgaagcgcttatcgtcctcttgcggggggaaggccggggattttccgcgggcggtgatatccagatgatgacgtcggatcatgattcgggagaatatgaacggctcatgaaaatgattgaatccattacgctgacgctctatgatatgaaaaaaattgtgatagccgccatccacggagccgcggcggggctcgggctgagtttcgcgctgtgcgccgatgtggtgctcgccgaagaaaacgcccgactcgcgatgaatttcatcggcatcggattggttcccgacggaggaggccattatttattaatgagacgcgtcggtgagatcgaagcgaaaaaactgatttggagcggtgaaaaattgccggctgaaaaagcggtgcggctcaagcttgccgacgggctgttcagcggcggccctgcggagggggcacaaccgtatatcgaccgattgctgcatgcgccgctgtcagcgatgattgaaacgaaggctatttatcagagcctccatatcagccggttaaaagacgttttatctcttgaacgaaaggcccaggaaaatatgagaaaaacggatgatcataaagagggcatccgcgcctttttagaaaaacggacgccgcaatttaaccggtaaaatacagaagccggaaagcttctgttatctgtggaataaaatcagctttccggcttcatttaccaagcggtgagtactgttctcaagctttttttcctctaacaaagcctctccggcggccttcgcctccgcctcattatctgcttcgatccgttcatccagcagcgtttctcccgacgcatggaatgcggtcaatacatattgtcccatcatgtcaccccctttatagaatgatattctgataaagaatttaaaatcctccattaatttttacccattattagtatataatgggtcaaggaaggagttggattcgtgcttacaattgaaaatgtaacgaaaacattcggcagctttaccgctgttgacaatttgaacctgcaaatacctgaaagggaaatgttcgggctgctcggcgcaaacggcgcgggaaaaacgacgacctttcggatgattttaggtcttttaagcctgactgacgggcatatcacctggaaagggaagccggtcaattattccatcagtgaaaaaatcggctatctcccggaagaacgggggctgtatccgaaagtgaaggtgagtgaccagcttgtctatctggcgagattaaaaggaatgagcaaaaaagaggcggaaaaagagctcatgacatggctcgaacgcttcggcattacagattacaagaataagaaagtcgaagagctgtcaaaaggaaaccagcagaaaatccagttcatttcggccgtcctgcataagcctgaactgctgattctcgatgaacctttcagcggtcttgatccggtgaatgtcgagctgctgaaagaagcggttatttctttgaaaaacagcggcgtttccatcgttttttcaagccaccgaatggagcatgtggaagaactttgcgagaatttgtgcattctccagaagggaaaacccgtcgttcaaggcaatctgaaagacattaagcggtctttcggcaaaaaaaatgtcaccgttcattcagatgatgacctcagctttttaaaaacgcatgaaggtgtcgtgaaatggaaggaaacaaatgacggaatcagactgcaggtcgcgaatgaaccggtttcgcaggatattttccgggcgctgcaagggaaaggttttatacggaagttcgaattggaagagccgtcactgcatgatatttttatagaaaaggtgggggccgtatatgaataaattttggattatgctgtttcatacatataaaaacaaaatcgcaacaaagtcattcattatttcgaccgccattaccgttttattagtattagcggtgaccaacctgcaatcgattatttccgtgtttcaatcggatgacggcaagcagcaaatcgcggtgattgatgaaacgggcgggctgtacccggcgtttgcaaaacagcttaaagcggcggatacagacaatgatctgcaggcaatggagacgaaggagtccgaaaaagatgccgtaaagcgtgtcaaagacggtgaatgggacggactgtttatcatcagacaggatcaaaaaggaacgataacgggagcatacaaggcgctgaccatttctgatgaatcagcgtataaactgctcaagcaggctttaacccagacgaaaaccgctgtcgaaaccgccaagctcggcatttcggcagaaaaagtcagcagcctctacactccgccggaagtcagcaaagacgcgctggaaaaaggggcgaaatctgaggaagagctcggtcaggtaatggggcttgtatacatcatgctgtttgtcatctacttctcagttatcatgtacgcaagcatgattgcgatggaagtggcgacggaaaaatcgtcccgcgtcatggaaattttaatttcaagcatgccgccgattcagcagatgtttgccaaactgttcggtatcgcgctcgtggggatcacacagtttgcggtgctgattgcagcgggttatctctcactgaagctgaaccctcaaaatgatgcgtcgtcgccgatcagtgcattcctcaattttacggatgttcccgtctcgacgatagtctatgccgtcattttctatttgctcggctattttctttacgcgacgcttgccgcgtttctcggcagtgttgtcagccggatagaggacgtacagcagacgattcagccgatggtttttttggtcgtggcaggttttatgatcgccatgttcggcatcggcaatcctgacgccggttttattaccgttacatcttacattccgtttttcacgccgatgattatgtttttacgcgtcgggatgctcgatatcccgttttggcaggctgcggccgggatcgccctgacactggtcactatcgtgatctttgcggcggtcggcgcgaaaatttacaaaggcggcgttttgatttacggaaacgccagcggattcaaagcgatcaaacaagcgctgcgcatctccaaaaaataaatgaaacagcccggaacagccgggctgtttttttattttacagaacgtgcattcgtataaaaacggtgctaaaataagggtaattcaatctgcagaaaggggagggcgagatggctgatctgacgtttattcatgccgctgacctgcatctggacagcccgttttacggcatttcgaatctgcctgaaccggtatatgcgcgtattaaagaaagcacatttcacagcgtccgccgtctgacggacggggcactccgggagcaggcagatttcgtgctgctttcgggggatctgtttgacgaagccaacagaagtttaaaagcccagctgtttttgagaaaacagtttacgagattacaggaagcgggtatccaagtgttcgtcatattcggcaaccatgatcatttgggcggtaagtggacgccgattgaatggccggaaaatgtacatatattcacctcgggtacaccggaggaaaaatctttctttaaaaacggagagcttgcggcaagcatatacggatgcagctatcaggaaagaagcgtaacggtcaatcaggcggcccgttaccggaaaatgaccggcgcgccttatcatatcggcatgctccacggcatgttatcaggagcggaagggcatgacccgtactgcccgtttacgaaagaagaccttgaaaaaagcggcatggattactgggcgctcggacacattcataaacggcaggttctgtccgcccagcatcccgccgctatttaccccgggaatattcaagcccggcatttaaaagaaaccgggcctaagggatattatctcgtccgggcggcaaacggtgagatgtcttgggaattcaaagaagcgcatgatgtgttatgggaggaaattgatcttgatatctcaggagctgaacatatgacttcacttctgaaagccgcatcggatacattctccggcttgcgcgcggcgggccgcccggcatgtgtcaggctggtgcttcgcggcgcggcgccccgcttttggacggaggcgcccgcaggcatcgcagaggagtttctttccgctttacaggaggaagaggccgaagaggaatgtttcgtctggccgcttgcgcttgaggatcggacggatgaaacagacagcgtgccgcccgatccgttttttaaagggctgcttcaggacatagaacaatgcgcggacatgagcggtgtatttgaagcccttgagcgtcatcccgtatatcggcgtcagatcacttcatttacagatgaagagatactggatattaagcggcaggctcaagccgttttaagacgccagatgaaggagcttcagcgatgaaaataacggcaatgcatatttaccaatacggaaaattttccgaccaaagttttcagctgtcagattctcccgtgcaagtgatctacggattaaatgaagcgggtaaaacaacattgatgtccttcatcaaaagcgtgctgttcggttttccgaaatcaaaaaaatacgaaccgaaaaacggcggggtttacggcggcactgtggaattgaagcatggcgatcacggtgccgtcaaaatcgaacggacaaaaggcgctgccgaaaaagtcagagtgtatacggcttcaggcgaaatcaaggacggagaatggctcaaacagcttctctccgatacagaccgggcgctgtacgaagcgatctattcgttcgatgtattcggactgcaggagattcaagcttttaaccgggacaaaatcggcgagtttctcctgtattcgagcttattcgggtcggaagcggcggcaaagcttgacgggcggctggcaaaagaacttgaaaggatgtataagccgaacgggcggaacccccgcttaaatcaggagttggatacattaaagcggctcagcgcccagctgaaacaggcggaagctgcggaagcgggctatcacagccttctggaagagaaaaaaagcgccggcggccgtttgcaggatgccgaagcacgattgaaagacataactgaagaaatcaaaacagtaaaatcggcgatagaagcaaagccgctcgcagacaaaaaaacagccttggaaagcgaactttcttcttatccggatgcattgaagcaattcccgaaggacgggatgcatcagcttgaaaaatacgaatcgcatctccatccgaaagctgcccgtcttgagggacttcgggcaaaagctgctgaactcaggcggcaggctgagctgctcgctccaaatgaggacttgctgcaaacagagcggcagctgcaggagctttccggcgagcagcatatgtacgaatcgcgcggtgaacagcttgccgccatccaatcacagatccggcagacatctgcccgcgttttgtcaggattgcagcagctcggaagacatgaggaagacggcattctttcactgaacaccgattatgaatatgaatggcggctgcaggaagccgtgcagagcgccggacaggcaagagaaagaaagacacagcttgatgcgattttcgaacaagcgcggctggagctggaagaagccgaacgaaaacatgccttgacgtcggaaaacattttggaccccgctgtcaggaaagaaaaagaagccgctttacaatcatataagcaaacggctgatacagaaggaaacgaatggcaggcacatgtacagcagctggaaaaacagcgcgccaaacaaaaaaagctctttctcggtgcgggcattctgttcattgcgattttcgctatgttaaaggaatggctgcccgccgccctttttaccggcgctctgctgctgtatatgctgtccggcatgcaaaaaccgctgccgtcagaaagaggaggggccggtcacaagaaaaagaagccgacgatctccaaagaagcggctgaccttctgcaggaagagctttggcgtgacggccggcaccggcagcagctgattgcggatcaagccgtgcttgaacagaaagaagcggcatatgaaagagtcatccgccaatatgaagaatgggaggcggaaatggcgccgtctgaaaaacaggcggaactttttatgaaggaactgggtttttcaggaagtccttcccatcttcttgacgcatatcatgtgatgaaagatgtcaaaaaagaaatccttaataagcatgagctgaccattgaagcgggccggctgcaaaagttgcaaagagcatttgaggaccgggtcaaaaagctgagtccttcagacggaagggagctgtccgtaaaagaaagactgcgcgttttgctggtacaggcggaacgggcccgtgaggaagcaaaacgaaagcaggcgctcgaaacggatctgctgcatgcacaagagcaaatgcgtgaattaaacgaagaagtccattactacgaacagcaggtcaaacagcttttcatggcggcaggcgcaaaaaatcgcgaacacttttgtgaactcgccagactgaatgaaagccgccgggaaacagagcggcagctgcgcgaaatcaaaacgcacttgtccggcataggcggaaaacagcttgagccgtatatgagccgcacagtgtccgaacttgaacatacagtcgttcagaaggaaacagagaaaaaaacgcttgaggaaaaaagcgcgcagctccgtgagaaaaccgctttattaacggtgaaacaagagcagctggagtcctcggggcttgtatccgatttaaaacagcagacagaaatgcagaaggagcgcgtgaaaaaaaccgctaaagagtgggccgcattacagacggtcagacacatcatcagggaaaaaatggagcggcataaaaaagtgacgcttccccgtctgttagaaaccgccggtgcattatacggaccgcttacggacggacgttaccataaattgtatttctccgaggcggatgattccattatggtcatgcggaaagacggaactgtgttttcagcaggcgaactgtcacaggcggcatgcgagcagctttatgcggcgatccgttttgcccttgcgtcagagagggaatctgcggtatcacttccgtttttacttgatgacagttttgtccattttgacaggcagcggctggagcggctgtttgatgtgctgaatcagctttcagaaggcgggcggcagatactttatttcacctgccatgagcatgtcagccggtcttttcacagcggacaagtcatgcggctcctgtcataaaagagtttattttcaaaaaagaggtatgtgctatactggtattatgtaagatatggagggagcttttaatagaatggcaaaaggtattatgctgcacgaggtcggcgagcaggtcgatcaatactttctgattaaatcttcgactaagggaatcgcaagcaacggaaaaccattcctgacgttaatgctgcaggaccaatcgggagatatcgaagcgaagctgtgggatgccaagccgactgatgaagtaacgtacgcggcgcagacgatcgtgaaggtgatcggagatgtccatcactatcgcggacgaaaccagcttaagctgagaaacatccggccggccggcgagaacgaaaatgtcagcattgatgattttctggaaacggcgccgattccgaaaaatgaaatgatggaaaccgtcactcaatacatttttgaaatgaaaaatccaaatatccagcggatcacaagacatctggtcaaaaaatatgcggctgagtttatggattacccggcggcggctaaaaaccaccatgagttcgtctccgggctcgcgtatcatgtagtgtccatgctgaacctggcaaaagcgattgccgatctgtatccgtctcttgaccgggatttactgtatgccggagtcattctgcatgatctcggcaaagtaaaagagctttcaggccccgtctccacgacgtacaccgtggaagggaatctgctcgggcacatttcgatcatggtgacagagctttcaaaagcagccgaagagcttcagattgacgctgaagaagtgctgattctgaagcatttgattttaagccatcacggaaaagcggaatggggaagcccgaaaccgccgatggtgaaagaagcggaaattctgcactacattgacaatctggatgcaaaaatgatcatgatggacagagcgctggaacgggtgaagccgggcgaatacacagagcgtgtatttgcgctggaaaaccgttctttctacaaaccgacgttccatcaataagataaaaaggccgattctctatgatcggtcttttttacgttcagctctcataacttgtctttatcaagcatagcttagaataaagactctgggtgaaaaagggaggaaaccgacgtgctattttttccttggtgggtatacctttgcattatcggaattattttcagcgcctataagcttttcacaacagctaaagaagaggaaaagcttgaccagtcgtttattgaaaaagaaggaagggtgtatattgaacggatggaacaggaacgcgagcgccgtatggcggcgcccgcaagtgaaaacacggatgcagaagaaaactccaatcattccatcgcataaaaaaactgtgcggggctcgctgagagcccgcacagttttttttatttagattcagaagaagttgaagtgttaaacgtgtcttttaagtctttgtcttccacttttacgtcagcttttttcatgactttttgaattgccgcctgtacagctgagttgtcgtttaatttctgtttaagaacttcttctttcaactcttttttcatgtcatcatatttgccgcgttcctctgtctttttgatgatatgataaccgaattttgttttgaccggatcgctgacttgtccgactttcagaccgaatgcagctttgctgaatgtttcatccattgactttttatcgaaccagccaaggtcgccgccgttgtcttttgagttgtcagttgaatattctttcgcaagcgtttcaaacttctcgccttttttcagttttttctccacttcgtcagctgtctttttgtcagcgacaagaatgtggctcgcccggattttaccttttaagccgtcgtaatattctttcgtatcagcgtcagtcactttgatgttgtctttcgccgctttttgtgcaagcagttcgtacttcacctgatctttcaggtaatcttcgccgtactgctgtttaagggcgctgtactgatcgccgagctgcgttttgtactctttcagcttgttatcgatttctttatccgatactttgtatttttttgctaatactttttcttgtacgagctgtgtcagcacacttgcgcccgcggtttttttcatattcgtgtagagttcgccttttgttacatttccggcatccgtcttggcaatcacgtcgttgtcgccgctgctgcaagcgctgagagccaggacgctcgttgccgtaatagctgctatcgcgattttcttcattcctttaaacactcctaatcatccaaattaaattgcatatgcgtatcataacatattgtggctttctgtaaaaagattttaaataaagggcattcgtctagtcaaactttttcctgatacatacaaatatattgatcatgaaaaggaggtaatgaaccatgggcggaggatattcaaacggtttcgcactgctcgtagtactgttcatattgcttatcatcgtaggtgcagcttacatttgttaagcgaaacggatcgctttttctaaaagcgatccgttttcttacccgggcgcctaatcgtttcagaagtaaattgcatatgatgtaattggaaaaataaaacgttttgtaggaggtgcttttggagatgggtgaagtatttgcaggcggttttgcattattggttgttctgttcatcttattgatcatcatcggcgcttcttggctttattaagaaaaaaatatggctgtcgggggtcagacctccgtcagccatatttttttgcctgtttacacagtaaaggagatctcgacgaatgaagagatcagtaaaattaaaatagatacattaataaaacggaataccttatcctgccggtcttcaggaatctctctgacaaggcataatgtatttgtgagcctgtttataaaataaagaataaacagggcagccacgataaaatagaataaaatgatgggagattccccctctctctgaactgctcccatattacattaccaaatatttattaaaaaagatagaatgtaacctgaaaaatcagcgggatatcaagactccggcactttttttactaaaatatcaaaaccgtcggattcctggtcaatcagacatgatttgggcgctttgaccaggtgcagcgcaaacagaagatcaggcaggcaataacccgcatgaatgctcgaaatcatataaaagtaatgagcgtgtctcggaaatgccagtccggcataaaacaatagcggcgtaatgaataaaaacgggctgatcgtagaaatcagcatcgtcgttttcggtatgcctttccatgtcggcatccgcaagaagtacattttcatttccttttttctttttttacagatcatcggcaggacatgtatgactttatgtacaaataaagtaacaacgagcagaacacaaaaagcaaacacgtgcccgtcacttaaactgatattcggacgcagcagcccgaatgccaagaagttgcatataaaaaacaggatcataaaacctacagcagtcaataataaacgaaccgcaccataatctttgatcagattaatggttttccagcaattcatcagagtcatccttccgtacaaagatggaatacaatctcaaaataatttactctcttcaggagaaaaaatcaatccttttttaaagaaaaaaaataaccccggaaagggaagaacagaagagctcggtgaaacatggaaatgtacggtttaacctttcttctccattcattatcagctaaaataagattaaagatagaaagaagtgaaacggatggattcaatggatcagcgtatcgggcgtttagaatattacatacaattgctggtgaaaacggtggatatggataagtaccctttttatgcgatgatgattgaaaaagggctgaccgaagaagaaggagaagaggtcgggcggatctgccgcgaattggaggacgagctggagtcgcaaaaagcgcaaggctttgtgacgtttgacaagctccttgcgctttttgcgggacagctgaacgaaaaattagatgttcatgaaacgatttttgctctgtatgagcaggggctttatacagcgctgatggaagaatttattgagataatgaagcactttgattaactgttgatcggttccagctcttcagccgtttcatggacagccgattcgtctgtttttttcttcagccttccgtcttcactatcaaaatcattgtttatgtttgtcaatgatttctcgaatatctccataaaatcttcgccgtaaatgtggcggatgacacaggttaattcttcaacttccggaaacttcccgaataagtggtagatcggctgtgagcctttaaacaccgcgtttctagacgggtcaaactcctcaagcaggctttcgaatacattttccccttcttctgttaactgaatgtacgtgttccgtttatcattcagccgcttggaaaatttcagatatccccgttcttcaagcttttttgaaaagttaaatgcagttgatacgtgcataacgccgaatttggcgatttctgaaatagaagctcctttaagctgataggcaatccataatatatgatgctcattaatattaaggtcgtacggcttcagccaattctgccagtctttctcgatagatttccagagtgctttggacagctgcgccattttttgggtatagattaaagcttcttttagatcgtaaggcggttcaacacgattcaatacagatcacctgcttcacattttcttttcctctattatgccaataaaataaagattaataaagatgaaaatttaagaattttataataaattcttaatccgttgctgtgaaaggctttaaaccgcaaaaaaaagtgcggaacgcaatatgcccgcactttttttggttgtataggatattagttttgtaaggttttctccagctgtctgattttctcttcaatatcagcgatttccttttgaagatcctgctggtgcggcttgatttcctcctgccaccttttaatgctggtctgaagctctccgcctacgtctttaatgacttctgcgctttctttcgccgtttggacaagctggtctttaagcgccattccgtctttttttaaccgtttgattgtgtcctcaattgaattgcaattcgctttgattttgccccgcagctcttttccggatgaaggagccgaaagtaacaccgctgcgcctccgatcaatccgcctacgaaaaggcctgttaaaagggaacgtccgtcagccatttaaaatcaccccgttttttttctcataacttttatcatttttgttcagaagaataaacttctatacatagcttgctttattttagcatattttttaagggaaaaggagggagaaggttgtctgtctttatgattgttttatcttgtatggctcttgtctttgcggcgggcgccgtttattacctgaaactgctcggccaggccgcttcttatccgccgaagcgggtcgtccgccaaaaggccatcgtctgctcagcaggaaccgccctcgcattgttccttatctttttcacaaaacttctcgtataaaacatgctgaaacacattaaaaaacctcttccggccggaagaggtttcggtatgcggttatttcaccgtttcaatcatattggaccgttttaagatcgtctgcacaatcggatgcataatgataatggcgatcgcattcagcgcagccgccggaaggacgaccgcgagcaccaaggcggtgaatccccccggcaggccgacaatcagaagggccagcgccagaaagagcaaaccggagatgaaggtgccggctattgtaatgacggcggcggccgctgttttcacgctctttttcaccaaaagcgccagcgcgagaaacagaaacgccgttaccggtttttcaatgatattcggaagctgtccgcccggaaaagatgtcgtgagtgcggaaatgattcccgttacaatcccgatcatcagcacgttctgcacacggggaaataacagaatacccataaacatcatcacaagcatcatatcgggtttcattccgaataataccggcggcataatggaatgaagcaccgctccgattgccgcaaacagggccataatgactaattcttttgttttcatactaagctctcctctgctaagctttttcgccatccaataatatgctcgtcatttattgcgatggccggaaaaattgatatgcaaacagtatatcaaaggaaccgttatgttagaagaaatttattcgttttcctgctggaactttttcataaactgagccagtttttcacaatcagccaggctgacggcgttgtagatagacgccctgcatcctccgactgagcggtggcctccgagtccggtcattttagccgctttcgcttcttcaacgaattttttcgtgagactgctgtcgcggagggtgaacgtgacgttcatgtgagaacggctgtcttttgcggcatgccccgcgtaaaaaccgccgcttgcgtcgattgtgccgtacaggacgtcggccttttcatgattgcgccgttcagccgcttcgacacctccgttttcagccagccattcaaggacgaggctcagcatataaatcgcaaatgtaggcggcgtattatacagtgaatcggcttttgtatgagtggagtatttcaaaattttagggacgttggcgttttcgttttcaagccatgattttttcatgatgacgaccgtgacgccggacggaccgaggtttttctgggcgccgccatagatgacatcaaacgttttgacatcaatttttctgctcaggatgtcgcttgacatgtcggctacgagcgggattggtgaattcgggaactctttccactgcgttccgaaaatcgtgttattggacgtaagatgcaggtaggcgccgtctttgattcctgtgaggtccgcttccggtatatggttgtggtttgaatctgcgcttgttgccgtgacggatgtgtttccgaacagtttcgcctcggcgagtgctttttcagaccatgcgcccgttacgatgaagtgagccgtttgctccggcgttaaaaagttcatcggcagcatggagaattgaaggcttgcgccgccttgaagaaataaaatatcataatcgtcgggaatatccatcagttctttcagaaggctttttgctttttgatgcaccgcatcatattctttgcttcggtgggacagctccatgacggacatgccggtgtcattgaagttgacaaattctttctgtgctttttgcagcacatccagtggaagggctgcgggtcctgcattgaaattcgttgtacgttccatgtttacgatctctccctgttttccgctttagtgtaagaaataatacaattatcctatcacaattttttgatttttttgatatgaaaaaatataattttatgttttttgtgttgccggacgcaaaaaaacctcatctttaagatgaggcaagccgttttctgacggttgaagcgatctcctgaagatcgtcaggcgtatagtcttcggcgtgggtcttccagacagccccgaaaccgtcgccttttccgtaacgcggaatgatatgcatgtgaaaatggaacaccgattggcccgctttttcaccgttattattgagaatattcagcccgatcggctcgaattcatcgcggatggcgcgtgcgactttcggcaccgcttcgaaatattctttagaaagctcaggcgtaaactcgtacacgttttcgatatgtgttttcggaatcacgagcgtatggccttttgtgacttggctgatatcaagaaacgccacaacatgttcattttcgtatacttttgaagacggaatgtcaccggcaatgattttgcagaaaatacaatcgtccgctttgtgcatagatgggtttcctccctgaaaagaaatatatgtatattctcatcgtaccacaaaaacggtcaaaacaaaaaacaggatgaacggctgcgcgttcaccctgatgcagaagtacgagctttatcacagaaaattaaatatgccttttgtaagcacctcatttgtttttaaaatgaagacttatgggtctgcttaatcattcctgggacaaacacctcatttgattatttcatcatgaatgaagaacatcatcaaagcagtgtgtgaagaaattgtaagcacaggacatgttgattttcatccaactgttctaagacgtcttttataaacacctcattttcagttgattaaagctgtttccttctacatacattatgatgtccgccaaaacgataactatgcacgcttttcacgtgagaaaaaaagggaatcgtttcaaatcagactttatttttggtactatgaagaaaaacgaatcagaaggggagaaattatgtctctgctatcggtaaaagacttaaccggcggttatacgagaaacccggtcttaaaaaatgtttcattcacccttgagccgaaccagattgtcggactcatcggattaaacggcgcgggcaaaagcacgacgatccggcatattatcggattaatggacccgcataaaggctcgatcgagctgaacggcaagacgttttcggaggataaggaaagctaccgctcgcaatttacgtacatccccgaaacgccggtgctgtatgaagaactgacgctcaaagagcatctggagctgacggccatggcgtacggcctttccaaagaaacgcttgaaaaaaggcttcctccgcttttgaaagaattcagaatggaaaaaaggctgaaatggtttcccgctcacttttccaaagggatgaagcagaaggtcatgatcatgtgcgcgtttctcgcggagccctcgctttatatcattgacgagccgtttctcggccttgacccgcttgcgatcaatgcattgctggagcggatggacgccgcgaaaaaagccggatcaagcgtgctgatgtcaacgcatatcctggctacggcagagcgctactgtgacgcattcattattttacataacggcgaagtgcgggcaagcggcacactggaagaactgagagagcagttcggcatgaaagacgcagctcttgatgacttgtatattgaactgacgaaggaagacgccggccatgaataatatgtctactatttggcagtcccggcttgaagagcatataaaggaaaccagaatgtatatgaaatatatgctcaatgatcatctcgtcattgtgctgatcttttttattgccggcgcggcgagctggtacagcaagtgggtcaaagacatccccgttcattttccctctttttgggtgatggcggtgctcttttcatttgtgctgaccggttcatacgtccggacgctgttaaaggaagcggacctcgtgtttctgctgccgcttgaaccgaaaatggggacatactttaagcattcatttaagtacagctatctgtcacagctgtttccgcttattgctctgtctcttgtatgcatgcctctgtttttcgctgtaagtccgggggcgtcgcttgcgtcgtatgccgccgtatttattcagatgctggcggtaaaagcgtggaatcaggccatggagtggcggatgacgtttatgaatgacagaagcatgaaaatgatggatgcggtcatacgctttatctgcaatatgctgcttttatacttcgtcttacagtcgttttatgtgtacgctgccgccgtctacattgtgatggccggcctttatgtgtatttcacatcagccgcaaaacataaatcattaaaatgggaagctcatattgaatatgaattaagaaggaagcagcggttttacagaatcgccaatctgtttaccgatgtgcctcacctgaaaaaacaggcaaaacgccgggcgtatctcgactttttgctcagaatgattccgtttgagcagcggaaaacgttctcctatatgtatgcgcgggcctttctgcgttcaaatgattatctcggcattcaggtcaggctcacgattatttttatcctgattattatgctcgtttccgccaatccgtggatcacggcggcgttaaccgtatttaccgtctttattacgggaatacagcttcttccgctgttcgggcattttcatcatctttctctgcaggagctttacccggtcaatcagaaagcgaagctgcaaagtttcttttcgctgatgaaatcgtcattaaccgtgcaggcgctgctgttctgcgcagcgtcagcctatgccgcgggagtcagcggggtgctgtatgcggccgttgcttcagccgttctgatttttgtgatcatgccatcgtatatgggcggaagattgaaaaagtacggcaagctgtaatcaatcgggtttttgaaacctcaatgaaagaaggagacacagatgaccgacgatcagcagctggtacaggaagcactgcaatggaaagcgcgttttttgcgcaaagattccatgcttgaacgcttttctaaaggaatgcaggcgaaaataaatgagcggattcccgaaaaaattcatgccgtcatcacagaaagcattaaaaaaatgaccgaagcaacaatggcgggttcaaatctggtgaaaagcaagcgggatacaaacggtatgacgcttgctgaaaaagatgctctcgccagacaaaccatcgcatcgtaccaaaaggtcgcggcagctgaaggtatcggtacgggggccggcggaatttttttaggaatggctgattttcctttgctgctatccattaaaatgaaatgtctgttcgatcttgcctccatttacggctatgatgtgaaagacagggatgagcgattgtttttgctgtttatttttcagctggctttctcaagcggtgaacagcggaaacgcatatactcaatgattgaacagtgggattcgaaaaagcatgatgtcgattggagagtttttcagcaggaataccgcgattatctggacgtggtcaaattgtttcagcttttgccggtcgtcggagccgccgtgggcggagcggccaattataaactgctgtcacagctcggtgagacggcaaggcacgtttttcatttaagaattacaacagccggtacgtaatgtaccggctgttttttttatgtcagcgggggtagcttaccgcggcgccgataagcaccttggcggccgtcagcatcgctttttcattaaaatcaaatttcgggtggtgatgaggataaacggtttccgcattttctaaagcggcgcccgtaaagaaaaaagcgccttttgtatgctgcagataataggaaaaatcctctcccgccatctgcggctctccttcaacgactttcgtaacgccgtctgtttccgctgcggctgccgccgcgtgcgccgcttcctcaggatgattgacgacggcgggatagccgcgtttgaaacgatattcataggaagcggagtgcatggaacagattccttttacgacggcttctatttctgcttcgagcaggccgcgcacactttcgtcaaacgagcggacggtgcctgaaatgactgcctgatcggcaatcgcattaaacggattttcagcggtgaacgagcctgctgagatgacggccggctgcaccggatttacccgccggctgacgatatgctgaagagccgtgacgatttgtgagccgattaaaacggcgtccttcgtatcgtgagggatcgcaccgtgaccgcctttgccgatgactttaatcgtaaagccgtcagcggcggccattactgggcccgggcggcataagaccgttccgacgggttcagtcgcccataggtgtgtgccgaaaatggcatcgacatgttcgaggcagccgtcctcaatcattgcttttgctccgccgggagataattcctcagcgtgctggtggatcatcacaaatgaccctttcagtttttcccggttgcggtacagcacttttccggccgcgagcagagccgccgtatggccgtcatgcccgcaggcgtgcatgacgccgggaatttgtgaagcatagggcacatctttttcatcctgtatcggcaaagcgtcaaaatcagctctgagtgccacgaccggtcccggttcaccgccttcaatacaggctgtgacaccgttgcccccgacattcgtccggatggggacgccgagcttttcataaaatgaggcgatgaacgccggtgtttttttctccttaaaggatggctcgggattcatgtgaaggtgacgcctgatttcaaccatttcctcatacagcccgtcaagctgagcgtttaagcttttttgaagtgtcgttaacgtcaaaagcgatgccccctcgtctgcttttcccatgattgtatagaaaatgtcagaagatttcaatctttttgctacgggagaatgatgatggcggcgatggtcgtgacgataagtccggccgcaacagggataaagtttttcctggcaagctcaaacgggtcaactttacaaatagccgcagcgggaatcagtgcccaagggaccaatgttccgcccccgacccagatcgctgaaatctggcccagcgccgttaaaacggccgggtccgtatgaagcgcggcagaaaacagctttgccatcgagcctgcaagagatataccggaaaaccctgacccgtcgagcccggtaatcgcaccgactgcggccagggcgatgccggcgaattctccggacatcggaaaagaatgggacagggccagtccgaggtcattgacgattcccgcagaccctttcggcagcggggtgttcaaaatatttttaaaccccgcgtcaccgagataaaagaaggccgcgatcggaatgacggggccgaatactttaaagccgaattgaaaaccgccgataaaatactcggtgatcttttctaaatgccgctctttatatacaatgaaatgaatgatcaggagaatgccgatcgcggttcctccgacgagtgccgtcgcatcgtttccttggaggcggtatacgatcatgcagataatatcggcgagaaaaacaagcggaatgaaaaccgccaggatcaccctgagttttttcggcagatacatacttgtgtccaaagaaccggagctgtccaaggagaggggggccttcgttttttttcgatcccgcatgatgaggaagaaagcggtgattgtcgtcgttaaccccatgatcaaaacgagcggaatacttgcctgcatgacatcgctcactgggatgcccgcggcatcggccgttaatttcggggccgcctgaatgacgtaatcccccgataaagcgaatccgtggccgaacaggttcatcgccatagccgcagcgatcggagaaaggcccgcccggatcgctgcgggaagcagcacagcgccgatcagcgccaccccgggtgacggccagaaaaaaagagagatggcaaacatcagacagccgataacccaatacgcgacagccggccctttcatcagctttgcaaacggagaaatcatcgcttcattaataccggttttggtcaaaaggccgctcatcgccacgataaaacaaatgataaaaatcgtcggcagcaattctccggcggcatacgtaaagctgtgaaacaggctgctgaccgaagcggagaatgaatgcgtcgtccatagcgcaatcacaaaaatgccggcgagtgaaataaaggttgtatcttttctgagaagcataaaaacgataatggccgcgataaaagcaacataaagcagatgtaccgagtagacgccgatccccaattgaaccactccgtttataaataggattgctacagggtattcataggcgggcggaaggtgcaaagaaggatgcgtaaaatcgggacatcaaaaaagccggagaatctccggcggttttcagtctattgcgtaataagcggttacataagacggacgggaaaaaatagacgtcgtgtcgataccggcagatgttccgcgttttttatgagcttcctgataagagtttgactgctgccaatcctgaaaggctttttcctcttcccacagggtcaaaatgacatacgtatcgccttcgagcggtcttaatacgcggatggctttaaaaccgggttcattttccactttgccggcgcggtttttaaaccggttttcaaacagcggacggccttcctgggtaacggcgatgttgttgaggacggcgtagcccggatttttgatttccccgacgctgtcgatgctttcataggaatggggcgcctgaaaaacggtttctccatttgtttcatgaattaaaaccgcattatcctccccttgcatcagcaccatattctcactcgggtgtttcttggcaatcgtctttaaaaaatcggctgtcccgtatgtaatataaaccttcatatcagccacctcctgcttgctagtatatcaaaagagtggtataagtttctattggcgactcattctgacataattcgaaacaatatttcccatactacaagttaagaaaggcgaggtgacttatgctgaaaaagaaaaaaagattctttattccggctgtaattgcggcggcaaccgcttttctcgcgttaatcggatacattatcattatatttctcggccattatgtcatcgatgaaaagaaattaatactgcacgcatcttcaaaaatcgtcgatcaaaacggtgatgaaatcgcgagcctctatacggaaaatcgtgagccggtatccattcagcaggttccggaagatgtgagagatgcctttatcgccgttgaagataaacggttttacgaacatcacggcattgatgtgaagtctgtcggacgggcggtgttccgggatgttttagcaggcggcaaggtggagggcggaagcacgatcacccagcagctggcgaaaaacatttttctgactcatgataaaacatttttgcgcaagacgaaggaagtcattatcgccatcaatcttgagcgtgattacagcaaggacaagctgcttgaaatgtacctgaaccagctttatttcggccatggcgtttacggcattcaagccgcgtcccactactactttaataaagaagtaaaagatttaaccgttgcagaaggagccgttctggcagcgattccgaaggcgccatctctttattcgccgattcagcatccggataaaaataaagaacggcgcgatacgattcttgcaatgatgaacgatcaaggctatatcagcgccaaggaagccgtcagagcccagggccggacattggggcttaatgtcaagaaaacatcagaaacgccttggtttgacagttatatcgatcttgtcatcaaggaggcggaagaccgttattcgatgtcaggagaacagctgcttcaaggcggttatacgatccggacgtcacttgattccaagctgcagaaaacggcatataccctcatgaaggaaagcggctattttccggggacggatcaggcggcagagggaagcgccgtctttattgataataaaaccggaggcgtgcgcgcggcggtcggcgggcgcgactacgtgacaaaaggatacaacagggttacggcgaagcggcagccgggctcaacgtttaagccgattgccgtatacgggcccgccatgcaggaagacaagttcaaaccgtattcgcttctccaagacaaactgacgtcctacgacgggtatgaaccgaaaaattatgacggacagtacaagggggaagtgacgatgcaggatgcgatcacttacagcataaatgcgcccgctgtctggacattgaagcagatcggcgtggatatgggaaaatcgtatcttgagaaaaacggcatgaacatttctgacaacggactcgcgattgcgctgggcggtctgtctgaaggcgtcactccgcttcagcttgccggagcttatcatacctttgcggcaaacggaatgtatacgaagccattttttatagagaacatcacggacgaagacggagaaacgttatccgggcctaaaaacggcaaaacgcgcgtcttcagcggacagacggcatggaatatgacgagaatgcttcagcaggtcgtaaaagaaggaaccgcttcacaaggcagctatcaaggtgacctggcggggaaaaccggcacgaccacatttaccggcatccccggcgcgacaaaggacgcctggtttgcgggatacactcccggactgacaggagccgtctggatgggctatgacaaaacggataaaacccattatctgaaaggcggcagccaatacccggtcagactctttaaagatatcgtcacaaaagcgggggaaaacggccggacattcaaaaagcctgaaaatgtgaaggaactgggcagcccgattgagctggaggcggtaaaatccctgtcggcccgttatacatttaaggcgatgggactgattacggttcaattaaaatgggatattcaaaaggatgatcgggttgtttaccgaatatatgagaagaaagacggaaaagacaagcttctggattcggtgaaaggaaaaggcagctttgacataccgtacgccaatctgttttcaggggcttcatacaaagtcgttccatttaattcgcagacgaatcaagaaggagagggaacggaatacgttcagccgaagcttttttcttcttaatcatgaattcggcgattttttgaacattaagcctcaattctataccattcagaaaaaacaaggtatagtgtaatgggcgaagaacacgaacgtatggttgcaggaggaaaggtggaaattcagatgagtaaacgagaagcgtttaatgatacgtttttaaaagcggcacggggagaaaaaacaaatcacgtccctgtctggtacatgagacaggcggggaggtctcagccggaataccgcaagctgaaagaaaagtacggcttagtcgaaattacgcatcagcccgagctgtgcgcgtatgtgacgaggctcccggtcgagcagtacggagtggacgctgccattttatataaagatattatgacgcctcttccttatatcggagtggatgttgaaataaaaaacggaatcggcccggtgatcgatcagccggtgcgctctgctgcggatattgaaaagctcggcgaactgaatcccgaacaggatgttccttacgtgctggaaacgatccgattactcgtaaacgaacagctgaatgttccgctcatcggtttttcgggagcgccttttacgctggccagttatatgattgaaggcgggccttctaaaaattacaacaaaacaaaagcgtttatgcacagtatgccgcaagcgtggcaaatgctgatggacaagctcgcggacatgattatcgtttatgtaaaagcgcagattaatgccggcgcaaaagccattcagatttttgattcatgggtcggcgcgctgaaccgcgaagattaccggcagtttataaaaccggtgatggacagaatattccgggagctttcagcagagcaagttccgctgatcatgttcggcgtaggcgcaagccacctggccggggattggcatgaccttcctcttgatgtcgtcggtcttgattggagactcggcatagatgacgccagaaaacaaggcattacaaaaacggttcagggcaatcttgatccgtcgcttcttcttgcgccttgggaagtcatcgagaaaaaagcgaaagcgatacttgatcaaggcatgaaaacggacgggtttattttcaatttagggcacggcgtattccctgatgtcaatccggcaacgctgaaaaagctgacggcgtttgtacatgaatattccgcggccaaaaaaacggaacaatcttcctgagcagatcgttggttataagaagattttcctgtcaaaatcaaggtagacagaccatcaaaagaggtgtttaacaaaatgagcagcaaaaagaaaatgggacttctcgtcatggcttacggaacgccttacaaagaagaagacatagaacgttattatacacatatcagacgcggaagaaagccggagccgcacatgcttcaagacttaaaagacagatatgaagcgatcggaggcatttctccgctggcaaaaatcacgcaggagcaggcggagaagctcgcacagcgtttaaatgaaatccaggacgacgtaacattcaaagtgtacatcggattaaaacatattgaaccgtttattgaagacgcggtggcggacatgcataaagacggccttacagaagctgtcagccttgtgctcgcccctcatttttcaacattcagcgtccagtcatacaacaaacgcgcgaaagaagaagcggagaagctcggcggcttgaccatcaagtctgttgaaagctggtatgatgaaccgaaattcgttgattattgggtcggccaggtgaagaaaacgtatgaatcaatgccgaaagaagaacgggatgacgcgatgctgatcgtctcagcgcacagccttcctgaaaaaattaaagaatacggcgatccgtatcctgaccagctggaggaatccgcaaaactgattgccgaaggcgccggaattaccgattacgcagtcggctggcaaagcgaagggaacacccctgatccgtggctcgggccggatgtgcaggatctcacgcgcgagctgtatcaaaagcatccttataaagcatttgtatacgtgcccgcaggcttcgttgccgatcatttagaggtgctttacgataatgattatgaatgcaaagctgtgaccgaagaagtcggcgcaagctactatcgtccggccatgccgaacgcacagcctgaatttatcgacgcgcttgcagcggtcgtgctgaaagagctggacaagtagaattaaacggtaaagaaggcgataaaaatgagtggcgataaaaaacatctggtcatcatcggcggcggcataacgggactagccgccgccttctacatggaaaaagaaatcaaggaaaaacagctgccgcttgaggtcaccctgatcgaagcgggcccgagagcgggcggcaaaattcagacggcgcataaagacggctacatcattgagcgggggccggattcttttttagaaaggaaaaaaagcgcgccgcagctcgttaaggatttggggcttgagcatctgctcgtcaacaatgcgaccggccagtcttacgtgctcgtcaatgagacgcttcatccgatgccgaagggcgcggtgatgggcattccgaccaaaatcgctccgttcatctccaccggtttattttctgtacccggaaaagcgcgggcggcgcttgactttgtcctgcctgcgagcaaaccgaaggaagatcagtctctgggtgaatttttccgcagacgcgtcggtgacgaagtcgttgagaatttaatagaaccgctattatcagggatttatgccggagatattgataagctgagcctcatgtccacgtttccgcaattctatcagactgagcaaaagcacagaagcctgattctcggtatgaaaaaatcacgtccgcagccttcgggacagcagctgacggccaaaaagcagggccagtttttaacggtgacgacaggacttcaaacgttggtggaggagctggaaaagcagcttacgctgacaaaggtgatgaaaggaacgaaagtcacccatatcggccgcgaggagaaaggatattccgtgacgcttgataatggcaaagtgctctatgcggaaggatgcatagtgacagcccgcataaagccgcggcgaaaatgctttctgatctgccggcggtttcatgtctcaaagatatgcattctacgtccgttgccaacgtcgccttaggttttcctgagggagccgtcaaaatggagcatgaaggtacgggattcgttatctcaagaaacagcgatttctccatcacggcctgcacatggacgaataaaaaatggccgcacgcggcgccggagggcaaaacacttctcagggcgtacgtcggaaaggccggagatgaatccatcgtagatctttcagataacgagatcattaaaatcgtaatggaagatttgaaaaaagtaatgaaaataaatggcgaaccggaaatgacctgtgtgacccgctggaacgaaagcatgccgcaataccatgtcggccataaggagcgcatcaaagagttcagagatgcgctgaaagcttcctatccgggcgtatacgcgacgggcgcgtctttcgaaggggtgggcatccccgactgtatcgaccagggaaaagccgccgtatatgattcactcgcttatttatttgaaacgtaccagcctccgttatcgtaaaacggaggttttttgcatgttcccgttctgtaaagggaacaccaataaagagaaaaaacatttgaatcttctttgcgactgtgataagttatcttatgtacaaaatgactaaaacgttcaaacggtcaatttaacgaggtgggaaacatgtccgtcgatcggaaaaagctcattctggaagcggcaacgaagtcttttacacaattcggctacaaagcaacgacaatggatctggtggcaaagcttgcaaatgtggggaagggaaccatctacacgtttttcaaaaacaaagaagaactgtttgatgatattttcaccactattttaagagaaatgaaggaacacgcagacgaagcgatgaaaccggagctttcatttcacgaaaatgttcaccgggcgcttgtcgcgattttggaattcagaaaaacacaccagctgactattaaaatttttcaggagaacgccgagattggtacaatagccgttcaggatgtcattgcgaaaatggagcgggccattctgtcatacattaaagaaaagatagaaacagccattgaaaacggaagcattaaaccgtgtgatccggaactgaccgcttttgtgatgctcaagctctacatcgcgctgatatttgactgggaaaaaaaccatccgcctcttgaaaaagagacgatcgccgaattgctggaaatgtatgttggtcaaggattatctaaataatagatgatccttcactttttaggtgccgtgaccgttttgtcaaatgagtcagtttgcggaaggaggcaacagggttgaatacaataaaaagccagtggaaagacattgtaacgaacaagaaactgttaatccccatcattgccatattattcgttccgctgatctacagcggagtgtttttgaaggcgtactgggacccgtacggcacggtggatcagctgccggttgtcgttgtcaaccaggataaaggggcggactacgaagggaaacatcttcagatcggtgacgatcttgtgaaagagttaaagaaaaatgataattttgattggcatttttcaaacgatcttgatcaatcgttaaaggacttattaaatgctaaatattatttattggtcgagattcctgaagatttttctaaaaacgccagcacggtaatggataaaaatccgaagaagctggatctgaaatatcatacgaatgccggatcaaactatgtcggcgcgacaatcggcgaaaaggcgatcgacaagctgaaagcctccgtgtcgaaagaagtgacggagcaatacgcaaaagtcatttttgacaattttaaagatattgccaaaggactcggcaaagccagcagcggcgccaagaaaatagacgacggcacgaaaaacgcgaaagacggcagcgccaagctgaaggaaaatttagcgaagcttactgaaagcaccgccaccatcggcgataaaacgcagcagcttgcagacggagcggcgaaagtgacaagcggaattcaaacgcttgacagctctatcgcaaaacttcagagcgcaagcgccgaaattcaagataaatcagggcagattgcttcaggaggaggccaagtggccagcgggctgaaaacgagccttgacgcacaaaagcagctccagcaaaagcttccggatttaacgaatggattaagcgcgttaaacagcaaggcgcaggaagtgtcgcaaaaagcggcggcatttgaagatgcgatcaattcagtcaacctctcagatattgaaaaagcggttggggagcttgagcagactgaaaaggaattgcagcagtttaagaaaaagctttctgatctgaaaaacagcctggatgcccgggatgacgcggtcaaaaaggtgattaaggacagtgatttcttaacggatgagcaaaaagcgaaacttgttcagcttctgaatgagaagcttccgaaggccgaccttccggatttagacaatatcgtcagccagcttccgtccggcggagatatccagcttccggatatgtcagtcataaaaagcgcgctggcagatgtaaaagcgaaggctgatcagctgaaagcactgcctcagtccacatcgaaactgtataacggcgcggcggcggtacaagacgcgattaaccagctgacggctggaactgataaattgtacagcggagcgcagaccgtctttgaaagccaaaacaaattgacggccggtatcggcgaatacaacagcaagttcggacagctcaaatcaggatcagaagcgttagtgtcagggagcggccaggtgtctggcggcttaacgaaactgctggacgcgcaaaacaaaatccatgacggctcgtccaaaattgagcagggtcaagcgtctctcggcaccggtttaagcaagcttttagacggcaccggacaattgtccagccagctgaaagatgcggctgatcaaaccggggacattaagacagatgacaaaacgtacagcatgtttgccgatccggtaaaaacggacgataacgcgattcattccgtgcctaactacggtaccggactgacgccttatattctctctatgggcttgtatgtcggcggattgatgctgacggtcgtattccctctgagtgaagcttcagggcgtccgagaaacggttttgaatggttcctcagcaaattcagcgtcattctgctcgtcggactgattcaatccgttatagtcgccacggttctgttaaaaggaatcgggcttgatgtggaaagcacttggagattctatctctttacgatgattaccagcatcgcgttcctgtcgatgattcaattattggcgacaacgatgggaaatccgggacgctttatcgctgtcatcattctggtgctccagcttggggcaagcggaggaaccttcccgcttgaactcctgccgggattctatcaagtgattcacggggcactgccgatgacttacagcatcaacgggttccgtgccgtcatttcaaatggcgattacggctatatgtggcagcaggcatccattctgttgggcatcgccgttgtcatgatcgcgctgaccatcgtgtattttacggtgcaaagcaaaaaagaacacaaaacggaagaagaaataacagcataagaaaaagaggcgctgagcagatgctcagggcctcttttttttgatttcgattaaaatccccatctcaccaaaagtccggtatacgtcaatccgccgccgaatccgaacaataccagcgtctggccttccgacagtttttttgctttcacagcttcatccaaagcgagaataatagaaaccgatgaagtgttgccgtaatattcaacgcttgtcaatgtccgttcaagcgggaagggcagtttttcacagatggattcgatcatccgcatgttggcgctgtgaggaacgaaccaatccagatcgtcttttgaaaagccggctttttctaaaagggcattgcattcctcaggcacggttctggccgcccatttatatacttcgcgcccgttttgcaccatatttcctccgcctttaagcggctcgccgtttaattctgcgctcagtcccgtgcgatacagcacgtccgcgcttcctcccgctgttccttgcacggctgccaaaaagcccggcgctgattcgtcgcgttccaccaatagggcgcctgcagcatctccgaaaagaacgcaggtcgtccggtcagtataatccgttacctttgataatgtttcaccggcaatgacaatcactttttgatgggaaccggcggtaattaatgcgtctgcgagctgaaggccgtaagtgagtccggcgcatgtggcgttaatatcaagcgctcccgtgtgcggccagccgaagtaagcctgcacgcgtgccgcggtgcttggaaacgcatagtccgccgtcgttgtggcgacaagaatcatatcgacatcatcaagagttccgctgtatcgttctgcaaggtttttcaccgcttccacacacaaatccgatgtgaattcatgttcgccggcaatgcgtctttccttcataccggtgcgctggacgatccattcatcagatgtatcgacgatgcgctctaaatccgcgtttgttaatcggcgtgccggagcatatgtaccgattgctgtaattttagattttgacatgaaaaaatcactcctttatatcagattataacacctgatattattacttggtactaattttaataaaaaaacccaagcagcatccgctgtttggggagcatgagaattttatttgtaaaacgggcttgtgtgaacgattaccaatgacggcagcagcggcggcatgaatgatgatgcttctttttgtctttcttctttttgtctttcttctttttacaagggtcttcttttttctttttacagtgatctttttcttttttacagcaccagaaggctgcaccagaccaatcatcctcaaaccaatcctcaaaccaatcattatgaaaccttttccgcttgtgcggtttacggctgatcatacatttccctcctatgctcatgctcccttcattctatgaaaaaagagcaggaaaagattggacgggttatggatcaaaagagtatattttaagaagaataaaattgataggaggaatgacctgtggaaaatatgaaacatacgatggaactgattaaagaactggtgtcgattccgagtccgacgggcaatacatacgaggttgtcgcctatacagaaagtcttttaaaagaatggggcgtctcctcttacagaaaccgcaaaggcggtctttttgtcacaattcccggccgtgatgacaagaaacacagattgctgacggcgcatgtcgatacgctcggcgcgatggtaaaggaaataaagtcggacggccggctgaagattgacttgatcggcggcttccgatatcactcgattgaaggggaatattgcgagatccaaacttcttccggcaaaacctatacaggcaccatcttaatgcatcagacttcagtgcacgtctacaaggacgccggcaaggcagagcggaatcaggagaatatggaagtccgccttgatgagcctgtccggacgaaggaagagacgtccgatctcggcatcagggtcggcgatttcatctcatttgacccgcgcgtgcagattacgccgagcggctttattaagtcccggcatcttgatgacaaagcgagcgtggctctgctcttgaatttaatccgccgcatcacggaagagaaaatcgaacttccgtatacgacgcattttctgatttctaataatgaagaaatcggctacggcggcaattccaacattcctcctgagaccgtcgaatacttggctgttgatatgggagcgatcggcgacggccagtctacggatgaatataccgtctccatttgcgtgaaggatgcgagcggaccgtaccattatcagctcagaaaacatctggccgggcttgcggagcgctatggcattgattatcagcttgatatttatccgtattacggttctgatgcctcagcagccatccgttcgggccatgacatcgttcacgggctgatcggcccgggaattgacgcttcacacgcttttgaacgcacgcatgaattatcgcttcttaatacggcgaagcttttgcaccggtacgttctatcgccgatggcataaaaaaccctgcgcggaaatcattccgtgcagggttttcattttaacctgaaatggttgtgttttgttctgttttggcgaggctcatgaccttcgcgcctttaacgggatcatactggccttcccattttgacatcacaacggatgccagcgcgtttccggtcagattgacgaccgtgcgggccatgtccataatccggtcaacaccggcgatgaatgcaaggccttctgcaggaatgttgaatgcgcctaatgtcgcaagcaggacgacgaaagaagtcccgggcacggcagccattcctttggaagtgaccatcaagacaagcacaagggtaatctgctgccaaatggacaagtcaatgtggtatacctgagcgaggaataaagcggcgatagattggtacagcacagatccgtctaagttaaaggtatatccgatcggcacaacaaaggaaacaatacctttcggacagccgatcttctccattttttccataacgcgggggagtacggtttcggagcttgacgtactgaacgctaataaaatttcatccttcatataggcgaggaatttgaaaatgtttactccggcaagctttccgacgattccgaatacaacaatgagaaagaaagccaaagctacatacactaaaccgaccagtttaccgagtgaaagcagggaactgagcccaaatttggaaacggtaacaccaatcaacgcaaaaacaccaaacggcgcaactttcatgacgaggttcacaacatggaacatcgcatgagaaacaccttcaaagaaggccaagacaggctttcctttttcaccgattgccgagatgccgagtgcaaacagcacggtaaagcagatgatggcaagcagatctccttcggctaatgattggaagaagtttgtcggtacgatatgcaggaatgtgtctgcgatagatttgttattttgttctttttctgtttcaacatattgactgatatctgtcttttgagcttcatgtatattaacgcctgttcccggatgaaacagattcgccaaagccagcccgagaataatggcaaaagtggtaatgatctcaaaatacaaaatcgttttgaagcctaattttccgacttgttttccgcttcccgcgccggcaacgccgatgattaagctggagacgacaattggaatcactatcattttgattaagcgtaaaaacaaatcgccgataggctgtaaatatgttggaatggcgggattgccgtaccagatgacaccgactacaaccctagtatgagtccgacgaaaatttgcgtcgctagtccaaagcgtaattttttcatagattacctcccgaagaaaaaagtgcaataagtatctaaaaagatagctattagaacaaattataatagaaaagaaaacaatccgtctatagaaaaatatagattgaaaatactgaatcttttaaaacgtacagataattgctaataatggtgaataacgccctattcagaaagtatgatgacggccgaaaaaacgggcgccgcacaacttagaattgtgcggcgccctattgtcacatatccttaattttcaagcagtcattgcacagattaatgtgacactcatactgctcaacaatctcatttccgcattcttcgcatttcttaccgggtaaatttctgaaaaaatccgacatcttttccaacatacccatccctctttcattgttttgtctctacattgtattataacagttttggaaaatcaacggctgttttggcacaatgtttaaaacatgcaatttgtacgaaaaataggtatattggaggaaaggatctttttatcataaacattcggagggtcatatgaaagttacagttattggatgctgcggcgggtttccggccgcaaacgaagcaacttcaggctatctgtttcagtccggcggctattctctgctcgtcgattgcggaagcgccgtattatcaaagctgtttgcctatgttccggcagaagagcttgatgccgtcattttgtcccattatcaccatgatcacatcgctgatatcgggccgcttcaatttgccaaacaggtcggctcctttctcggaaaagggacgcatgcactgccgatttacgggcatgatgctgatatagaacagtttgagcgtcttacatataaaacgcatacgaaaggagtggcctatcagccggaccgcccgctttctgccgggccgttcaccattaccttcctgaaaacggtgcatccggtcacttgttatgcgatgcggattactgacggttcagcttctgttgtgtatacggctgattcaagctaccaggacgcgtttatcccgtttgcggaaaatgccgatctgctgatctgcgagtgcaatttttacgcggaccaggacggcacgtcagccggccatatgaacagtttggaagccggacgtatcgcggaggaggccggagcgggggagctgattctcacacatctgcctcatttcggcgagcaccggaagctgaaagaagaagcggaatccgtgttcgggggcgaagtgacaatcgccgcttccggattgaagtgggagaaataaaggaggagcaccatgttatttatcgacaaccaaaacataaccgacccgaggatcaacctcgcaatcgaggaatattgcgtgaagcatctcgaccctgaacagacatacctgctgttttatgtcaatcagccgtcgattatcatcgggaagaaccaaaacacaatagaagaaatcaatacgaaatacgtagaagataacggaatcatcgtcgtccgcaggctgtcaggaggcggcgcggtttaccatgacctcgggaatctgaatttcagttttatcaccaaggatgacggcgacagcttccacaattttaaaaaattcaccgaacccgttattcaggcgctgcgccagctcggtgtggaagctgaattaagcggccgaaacgacatcgtcgcggacggcagaaaaatttccggcaacgctcaattttcgacgaaagggcgtattttcagccacggaacattaatgctggattccgccattgatcatgtcgtgtcagccttaaaagtgaaaaaagacaaaattgaatcaaaaggcattaagtcaatcagaagccgtgtcgccaacatcagcgagtttcttgatgacaaaatgacggcggacgaattcaaaaaacatctgcttcaccatatttttaatacaaatgatctttccgaagtgccggaatataaactgaccgatgaagactggaaagcgatccggaagatttccgaagagcgctatcaaaactgggactggaatttcggaaggtcgcccgcattcaaccttcagcattcgaaacgttatccggtcggatcgattgatctgcgtcttgaagtgaaaaaaggaatcattcaggactgcaaaattttcggtgatttcttcggtgcgaaagatgtgagtgaagtcgaacaggcgctgaccggaaaacagtatgacagaaccgctatcagggaggcgctggccggaatcgatctgaaacagtatttcggcaaaatagagctggaagatttcctcgagctgatttattagaacatttgccgaacgcatgatttgaatctgcgcccgtttttgtgaaatgatagaaccataatgaatggggagggatcatgatgaaagtatttctcatcggagcaaacgggcagatcggacagcgtctgaccgggctgtttcaaaaagacggcacgcatacgctgcgggcgatggtccggaaagaagagcagaaagaagcgcttcaagccgcgggaacagaagccgttcttgcagatttggaaggaagcacggaagacatcgcgaaagccgctgaaggctgtgacgcgattgtgtttaccgccggatcaggaggaagcaccggatacgataagacgcttctgattgatcttgacggagcggcgaaagcgatagaagcggcaaagaaggccggcatcaagcggttcattatggtaagcgcccttcaggctcataaccgcgacaattggaatgaagcgctgaagccgtattatgccgcaaagcattatgcggataaaattcttgaagcgagcggtctgacgtatacgattatccggccgggcgggttattaaatgatcccggcacgggaaatatcaaagccgcagccgatttagaaagaggctccatttcaagagacgatgtcgccaagaccgttatcgcatcccttgatgaaccgaatacgtatgaaaaagcgttcgatctgacagcgggcggcacgccggtcagtgaagcgctgaaacaattatagtttccggttttacggcactcggggctttttgcccttgagtgtttttctatatttttctataataaaagtgaacgtttattccggataaatgaatgactattcattcattatatttttaaaggggtgggaaaatgaatctggtttccaaattggaagaaacggcatcgcagaaaccggaaaaaccagcttgtctgtttcaagatcagtacatgacgtatgaggagctggcaggtaaaatcaaagcatttgcaaacggcttggaggacaggggactgaaaaaaggggatcatctcgcgctgctgctcggaaatacgcctgattttgttattgcgtttttcggcgcgttaaaagcgggaattgtcgtcatacctgttaatccggcatacacaccttcagaaatcgcatacatgctgaaaaacggcgatgtcaaagcgatcgccggcatcgacctattaattcccgtatttgaaagcctgcacggctcgctgccgctgctggagcatatcattatcagccagacagcagagaacgctccatcgacagaagaccctcaattgcgcttaaaaatgacaacgtttacaaaaatgctccgcccggcggagcgcagcagaacttatccgacattgtccaaagacgatactgccgtcattttatacacctcagggacgaccggaaaaccgaaaggcgccatgctcacccatcagaatcttttctccaatgcaaatgatgtcgccggatacttaggaatgaatgagaaagacaaaattgtggcggcattgccgatgtttcacgttttttgtttaaccgtttgtatgaatgcgcctctgatgagcggagcgtgtgtcttaatcgagccgcaattcagcccggcttctgtgtttaaactgattaaaagccgtcaggcaaccatttttgccggcgttccgacgatgtataactatctgtatcaatacgagcacggcaaggcggaggattttgcgtccgtcagactgtgcatttcaggcggggcctccatgccggtcgctctgttgcagacgtttgaacaaacctttgacgtcaccattctggagggatacggactttctgaagcgtctccggttacttgttttaatccgtttgaccgggggagaaagcccggctcgatcgggacgaatattttacatgtcgaaaataaagtcgtcgatacgctcggacgcgaattgcccgaccatcaagtgggagaattgatcgtgaaagggccgaatgtgatgaaaggctattacaagatgcccgaggagacggagcacgcgctgaaagacggctggctgtacacgggtgatttggcgaagcgcgacgaagacggttatttttatatcgtcgacagaaaaaaagatatgattctcgtcggcggatacaatgtctatccgcgcgaagtagaagaagtgctctacagccatgagggcattaaagaagccgtggtcatcggcgttcctgacgccaaaacgggggaagcggtgcatgcttatatagtgcctgcggacggtgagctgacagagcaggcggttttcgattactgtgaaacacatttggcaaaatataagcggccggcggaagtggtttttcttgatgagattccgaagaacgcgaccgggaagctgctgagaagggcggtccgggacatgcttccgaaatgacggacgaaaagcgaagccgggggcttcgcttttacatgctgatccggtcagctgtgcgattcttccttaatgatgctttgcacaagcttcgtatcatgccgggtcagtttgtaatacgtgtttttatgcttgtacatcatataattgccgctttcgagccacatactgaatgaatcaaaacggtcttcatggtatttgaccgttccgtcgtaatcgggagacacgcttttggtcagtttgacttgttttccttggttcaagatatcgagcatatcttttacattctgcctgtctttaattttgatttctttttttccgttctctgacagaataatcagatctgcgttgcttgatggaaacacatcgccggtccggctgtatacatagaagaaagcaataaccaaaagggcgattactacaataaacgcgattatttttttcatattcatcactccgtcttttagtctttcccgcttcctgttgttccattcttttctgttgtgaaaagattaacatccgtttcggaggcttggttctatttatttgcatttatgcttacaataggagtaagtcataaggctaaggagggagacttccatgcgcaaatggatagcggcagcgggacttgcctatgtgctgtacggcctttttttctattggtatttctttatgacaggagactccgccgtcccggaggccgtaaagggaacgaaagccgatccgtcctcgttcatggacccgggccgcctggcagccgctgaaaacttttcaaatgtaaaggattttttatttttcatcggagcgccgttagattggtttttattttttctgctgctcattacggggcttgcaaaaaaaataaagcattggctggaagcagcggtgcgctttcgggtgctgcaaatcgtaagcttcgtatttgtgatttcactcatcgttacggcggcttcgcttccgcttgagtggatcggatatcgggtttcgcttgcgtatcatatttcgacgcagacagcagcaagctggataagagaccatgtcattgatttctggatcagttttccgctgtttgccgtgtgtgtgcttgtgttttactggctgatcacaaagcatacaaaaaaatggtggttttacgcttggtgtcttactgtgccgtttaccctgtttttgtttttcctgcagccggtcgtgattgatcctttatacaatgatttctatccgctgaaagacaaggagctggaaagcaaaattttgtcgcttgccgacaaggccgacattccggccagccatgtgtatgaagtaaatatgtcggagaaaacgaatgcgctgaatgcgtatgtgacgggcatcggttcgaataagcggatcgttttgtgggatacgacgcttaacaaactgaaggatcgggaaattttgttcattatggggcatgagatggggcactatgtgatgaagcacgtgtacatcggactggccgggtatctgctgctgtcattagccgggttttatatcattgacaagctttataagcggctgtccaaattcttcggccgaatgcttcatataaaggggcctgaagatctggccgccctcccgctgttattgctgctcatatccgttctcagttttgcttctgatccgattacgaacgccgtctcccggtatcaggaaaacgccgccgaccgttacggcatcgagctgaccggaaaccgggaagcggcgattgagacgtttcaggacttggccgatacgggactgagccgggtcaacccgccgtttctcgtcaaaattttcagagggagccacccgtcgatcatggagcggattgaacatgcggaggaagaaaaataataaaaaaaccggcggggccatggccgacgccggttttttatgttttactgagctgccgcctgtacgttgatcagcccttttccatagtagaaagcatcaccaagttttgtagtggtgttttctaaactgctgcggacttgagtgtttgtccagttcgggtgcttagaaagaatcaaagcagccgctccggcaacgtgcggagatgccattgacgtaccattgtacgctccgtatttgtttccaggaagcgtgctttggatagagacgcctggtgccatgacatcaagctcagaacctacgcttgagaaagatgctctttggttgctgctgttaacagcgcctaccgcaatgacagaagggtatttaccagggtagcccactgtgcttgagccgccggaagtgccttcgttaccggctgccgcaaccactacgacgccggaagcaacggctttgtcaactgccgcttttaacgctgcagaaccagaaggtccgccgaggctcatgttaataacgtccatattgtttgcgatcgcccactcaattccgttaatgatccagctgtactggccggaaccgtcagcgccgagaacttttacagcgtaaagagatgcgcttggcgcaacgcctaatacaccgactgagttattaagagctgcaactgtaccggcaacgtgagttccgtgagagttgttatcttggaaaggatttgtttcagaaggaaccatgctggctccgcctgctacctttaaatcaggatgagaagaatcgataccgctgtcgataaccgctactttaacatttgatccggtgaagccttgagagtgcagtgcaggggctttaatctgtgatacgccgtaaggcacggactgcgcgtacgcctgtgcaacgtgatcttcttcaacgtaagcgacgctagggtcttttttcagctcttttacagctttttcatttaatgtagctgaagctgcgtctacatatttgaattgcttttccactttcccgcctttttcagaaatgacatcttttttcttggcggcgctcatcgtgctcattgtctgcttaaatccgacaatatatttcttttccccgtttgatttccctgcagcctgggcagaagtcgtgctgccgaacgccatcgtaaagattaacgctaaagcaaacagcaaactgatccatacctttttgcctctcactctttatccactccttttttcatttgcagaataaccaatagacagattattctgtggattaattgtatagtatggaataatattttagtagacccaatttttttcagtttgttttatttctatttaggtatatcatctctctttcgtttaataggaacccgaaatatttaaattttaatggaaaaaaccgatggaaggacatgagtatttgtacacagccgcaatcgctctcttgtttactgggtcgaacggtttgattccatttttggaagctgaggcaaaaacaggataaatgtcaccttttgttgaatgcagaagtctgatggaaacgaaagcggaatgaaataaagcggccggcatgaatcagtctttgactttcttgagggagaaaagctgtgaaaccattttataaaaataatgataatgaatatcattgatacttatattgtcaatgatataattgcggaaaaacgaaagagcgggaacagatgaaaccaattttcagtatgctgatgatcttatccgttctcttcataacggcatgctcagaacaggaacatgaaaccgccgtcaggcatgatctggggacggcgcatgtggctgcgcacccgcagcgcatcgccgtattgaatgagggctttattgacaccctccatgatctcggtataaagccggcggccgcggcggataaccggaaagagcgaaacgacggcagtccgtccgtcgggcccccgtcacatcccgatttgaaaaaaatcacttcgttaaaacccgatctcatcattgcagactcaagcctgcacagggggatataccatgagctgacaaagatcgctccgacaatcgctttgaaaaatgaagctgcggattatcaggatgcggttgatgctgcccttaccattgaaaaggcggtcggtaaagagggcatcatagagaaacaattgtcggctcaggaagaaaagctgaatgacatcaaaagaaagctggatgcagaaggcggcacgattttattaattgacgctgcaaatggcagcatttccgtaaaggatgaccggtttttcacatcccggcttttgacgctcgcagggtttacatatgcggtccagacggattccggcgggaaatcagacgctatcaaaatgaggcccgggcagcttttgcatatcgatcctgattacatcgtactattggacggtgaggaagaactcgaaaaaaatcacctctggaaacagctgactgccgtaaaaaacggacacgtttaccgcgcggacagggcggtatggacggagcgccggagcattgacggtgcggacgccgtattacatgatcttcagaaaaaaatgctcgccaaaaaggcccaaaactaattcgggcctttttgttatgattctgataggtggctgcttacattgtaatctttgacgcgccacttattttcaattcgttcgatattgctcaggcacgcattgacaagctttgcgttttgtatgccggtatcaccgtcagaaatagcggacaagagggcgtgaatagctgcgccgtgagcgacgatcagtactttttgatcaggaaaccgctcctgaactttcactaaaccggcaagcattctgtctgtcagctcttctgcggtctccatgttcgggtagtttttatccgggtagcgcttcgaccgttccggcaaagacattccttccgcatcaccgtagctccgttctctgaaatcttccatgacgacaatgggaagattcaaaaacccgttaataatgtcagctgtttttctggcccgtttcatcgggctcgagacgatgacatcccattcggacccctttaagtactctcctgtttctttcgcctgacgctctcccgtcgcatttaacggaatatccgatttgccttgaagcttcttttgggcattccaatcagtctctccatgtcttactaaacaaacggcagtcataaagtctccactccgatcattttttatcgatatcatctattatactgccgttacgttaacacttcaaagagaagcgccagtccgactccgcctccgctgccgatcgctgctgctgcgtagcgggcatccgggcgtctttttgcttcataaaaaagccgggtgataagcgccgctccggaagccccgtacggatgcccgacggccagagcgccgccccggacatttattttagaatacggcacttgaagctgctgtgaaaaaacgcatattttgacggcaaacgcctcgttgatttcgtatatatcaatatcatccggtgacaggtcccgttccttcaaaagctttttgacggcataaaccggagctgctgacggataatgcggatggacgccgcttaccgcgcttccgataaaacgcaatcccggctttaaaccgagagaccgcgctttttgttcttccatcacacaaactgccgccgccccgtcagaaattccgcagctgttggccgcggtgacagagcctccggactgaaagacgggtttggcgcgggcgatgagaggccccatgttccgctttttcagcatgttttcgtcagcggcgaatccgtgacaggggagaatttcccggcggtacaagccgtcttcgtgcgctttgacgctccgttcatagctgagaagggcatattcatcctgcatctttctcgttacgccgtaagcctgtgccgtatactcggccgctatgcccatatcaggatcgccgatgtgttcaggagaaaagcgcgcccgggatgagaaaggggaacggctgctgctctccgctcctcccgcgatgtatgtgctccccgcgccggctttaacaaagtggcacgcgaccctcacggcgtccaatccggaaccgcactgcctgtcgatggtcgtaccggacacgctcaaaggaagcccggcggccaaggctgacagccgggcgaggttcccgccgcggcccgtcgcgtttccgatcaggacttcatcaatgtcttcgggcatgttccggctcaaatgtcggatcagcggagctgccaaatcttcggggagacagtcttttaacaggccgttttcccgggcgaaaatcgtccgcttcgcatccgtaattacagcttccattccatcatgtcctttgcctgcttttgtacggcggcacgggcgatctttccgccggctgtttccggtatttctgaaaacagccattttttcgggattttatatgccgccagctgctcgcggcactgtttcttcagttcctttacatttgcatgtccgtcgatcaccgcaacggcgatgctgccccaataatcatcaggaatgccgatgacggccgcttttctgacgcccggacagcggttgagcacacgttctatctcttccgggaatacattcaggccgcctgatacgatcatcccgttttcacgtccttcgatataaagatagccttcacgatcgatatatcccatgtcatcaaccgtcatccagccggaatcatcaggttttgcgccgttgatgtatccggaaaatttcatcgggctgttcacaaaaatcttccccgtttcgcccggcatgcagcgttccccgccgggccggcggatttcgattgtaacattttcaaacggacggcccgccgcgtcaggcttccgggcgctgtcttcaggcgataagaacgccacgaaactcagctcagacgttccgtaaaaatcgtacaaccgtaaatggggatagcgctctgacagcgcttgtttagacgaagcgggccagtctgcaccggaagaaatcaccttgagcggtgtatccggaaacgcctctagtgagagcagggcgtccgtcattgtcggaacggtatatagaacgtcagcttgtctgagccggtctttcattccggccggattgaattttctttgaaggaggacggttccgccgataaacaaagtgctgacggcgccgtataaaaagtgtgacgagcgaagcgtgcccggtaccagcactttgtcatcaggggaaatgccgaattcacgtttcgtacaagaaaagctctccagccacgaacggtgagagcgggtgaaggctttcggcttaccggtcgatcccgaggtgaatccggtataaaagggcaggccggtgtttttgataaaagtgccttccgttttttccgcctcgatcaaaggcccgcattcatcccacaggatgacaggcgttttgatgccgtccagtctgccgctcagccggcggtcacagatgacgaggtcggttttgctgatgtgcagctggtccgcgagttccgccgcagccgagcggggatctaacggaaccgccgtgcagccggcatgcgccgcccctgcgaaaagttgtaaaaatgggatgccgttcggcagtaatattgcaatgttttccggcttatctgaaaggctgccaagccagtttgcggtttggtttactagcctgttccaagtttgataggtgatctgttctgtgtctgtctgaattgcgatccgttccggcgcttgtccggctgtatctgaatatgatgatgtaatcatgatgactaaaatcagcttcctttcgtcggcaaaagccggcttgcttgaagagtttttctgattcttacggctgcgaatgaggctgcggccgctttaagcagatctccgggcacatagatgaggctgagctttacggcagtcaagatatcaatgtgcattataaaagcctgaacgggaatgccgatgacatacaaaaacagcacgccgaacaagaactgtctgataaacaaatgggggacagcagctgagcgaaggccttggatgctgaggctcagcagtaatgccgccagcggatatgcgatgagatatccggcgctcggcccgaaaaaaaccccgaacccgcctcttccgcctgaaaggagaggcgctccgcatgccacaatcagcaaaaaaagcaattggcttaaaaatgccgctttcggtttaaggatgcttcctgataagagcacaccgatcgtctggagcgtaatcggaaccggcgtaaaggataagaaaagcggcggaagcagccccaaaagtcccataatggcggtaaacacggcaatatgcatcatttctgtcaatttcattatgtattcctccagcttatcaaaatatgtttatacaataaagcgagtctttatatatgtcaactctattatattttaagttaacattaaaaagaccggccctttatgaaaaaggccggtcggtttatctttattcttctgtaaggataacaagtgaatcaacggatgatgcaacgtgggaaacggcgcggctgacttcttgaaggccgccgagaaaggcctgcaaatcaacgtcgattttgcctgtctggtctttgctcgttttcatgctttggacgatgtcatcaaacagacggttgatctgcgtcattttttctttcgtttcgcttacaagtccgtttacatctttaatatgtttggacacgatgttgatttgtgtattggtattgttcacgagctctgatacggtggaaacggtttttttcgtatcctctgaaagcttccttacctccgtcgcgacaacggcgaaccctttgccgtgctctccggctctggcggattctattgaagcgttgagtgacaggagattcgtttgctcggcgatccccgtcacgatgccgaagattttttcgatctgctgggcgatgtcattcagcttgtccatttcttcttcaatctgcagaaggctggcgtcgattttattcatctgctgctgctggctttcaagctcttttttcccgccgattgatttttcttcgacatgtacggaagtgacggtgccggcttttgacgcctcggaaatgccctcagatttatcgaccagctcctgcacggctctgctcgtttctgaaaacaaatcagcgagtgatccggatgtttcctggattttctgatgaagacgggctttcttttcctcttgttcgtcacgctggcagttatattcagtctggaatgcttcaaggacgagctgctgttcaagattcaatattttcgtcgtcgctttgatcgcttttaaaagctcatgcaaatccggaatggttgcttcatatatgttcatcatcgacagaagcagatcctgaaacgctcccatataccatttcggttcaaggccgatccgcaagtggatggaagcgatgcgctgtcttttttcaatgaattcatcatcaattgtgccggcgaacatctcatggatatgacgccgtaatgtttttttcaggcgctcgaccgtgctgtggtcgttaatgatcgtcattaatgatttttcgtgatccaggtttcggtaaaaggaatcgacgattgttgagatatgttctttaattaacggctgcagctcttcaagcacatgaagttcttcgtttccgagcctgaccattttcagctgtttttggacatctgcatattgatttgaaagcgcgatgcgtttttttccatcggcttctgaaaaatatgctgtttcttttttgcggtcttttttaaataacaatattagttcccccagatattctctttttctttttatcggtttggaaggaacttgaatgaaggaatctgataaaaatattttaatgcggaaaaaaataaaaccattcgtacagaatggtttagtcaatcttgggtgagacgtttcagcggcttgatggcgggaccttcggcaaccccgccgtcgggtgtgaaccgggacccgtgacatggacagtcccacgtccgttcgccgtcattccattcaacctcacagcctaaatgggtgcatgtcgtatcgacaagatgcagacagcctttttcatctttataggcgccggcccgtttgccgtttaccgttacgatttttccctcccgggcccaagactctcaggcgaagcgtccggcctctcaagtttgcccgagataaggtgtttggccacgtcggcattataggaaatcagttttttcagtccgggatctgcgtggaagcgtgacggaataaacaggccggaaaacgggttctttttgttttgaatatgatcagccaaaagcttcgcggcgagcgctgagcttgtcatgccccattttttaaaaccggtcgccgccaaaatatgttcttcatcgcctgagatcggaccgatgaacggaattttgtcaatggtgacaaggtcttgtgcagaccaatgatatgggatgctttcaactccgattgtgtcttccgcaaattgtttcagcgcttcgtaatgcccggacatttcttttccttggcctgttttgtggctttcaccgccgacaagcaccagtttttcaccgttcaaatcggtgtatcgcagtgatctggacggcttgtctatgctgagatacatcccgtccggatacgcttgtttcggttttaccgcgagtacgtaggatctgctggcatacattctggcggcataaagcccgcctccgtcataaaaaggaaagtgggaagcgcagacaatgtagctgcacttgatgccgtgtctgtttttcgtgaccacttccggctgcggttctttttttatgtcgatcgcagccgtctgttcaaaaatccgcgccccgtttttaacgatctctttgacgagcgccgcaccatataaaagcggatggaattgcgcctgattcttcatggcgaggccgagcctgcaatcaacggggacgggaagttctttcacaagctcgtgttcaataccgagcttggtataagcttcctgctcactgcgcatttttttgacgcctgattctgtattggtgtaaagatatgcgtcttgttcaatcagtctgcagtcaatcgaaaggtccttgatgatctgcttcatgtcttccatggcgcggagatgggcttcgaaatacagccttgcgctggtcaggccgatctgctgaataagatcggcatagatgaaatcatgctgggcggtgatttttgcggtcgtgcccgcggtcgtcccgtttaaaatccggtctgcttcaatgacagcgacacggaaacctcttttcgtcagttcgtatgccgttgtcaggcccgtaattcctccgccgatcaccgcaacgtcacattccgtatcttcagtgagggcgggaaaggaaggaatgtcagctgttgctttccaataggaagccggttcctcgtttgaaaaagtagtcaattcagatttacctcctctgttgtatattcttaatttttccaataagactctgttcatacatgaaattcgtataagatgctcaaattactcataatatagtaattaatgtaaaggagtgatcaaaatggcgaatcagaagaagaaaaccttgccgccgcagcatcaaaaccggcagccgggctttgaatatgtaatggacccgcgccccgtttttgacaaaccgaaagcggcgaaaaaacttgaagggaaaacggcgatcatcacgggcggagacagcgggatcggccgcgccgtatccgttttattcgcaaaggaaggcgctaatgtggtcatcgtttactttgatgagcatcaggatgccgaagagacgaagcaatatgtagaaaaagaaggggcgaagtgtctgctgatcgcaggggatgtcggcgacgaagccttttgcaacgatgtcatccgccaggcgggccaagcctttccttccattgacatcctggtcaacaacgcgggtgagcagcacgtgcagccggggattgagaaaatcacgagccaccagctcatcagaacgtttcagacgaatattttttcaatgttttacttgacgaaagccgcgctccctcacctgaaaagaggaagttcaatcattaatacggcctccattaccgcctataaaggccacaaaacattgattgactattcagcgacaaaaggggcgatcgtcacgtttacaagatctctttcccaatctcttgtcactcagggcatcagggtaaacgcagtggcgccggggccgatctggacgccgctgatcccggcgagcttctcggcgaaggaagtggaagtcttcggctcagacgtgccgatgcagcgcccgggagagcctgttgaagtggcgccgagctatttgtacttagcaagcgatgattcttcctatgtcacgggacagacgattcatgtgaacggcggcaccatcgtaaacggataatgtaaaaaaagccaatccatatggattggcttattcactctgtttgagagcggcatattcttttgaaagcgtgaggaacgcttctttatttttatcatcaagcgccttattaatctgcattgtcagcatggcgatccggcgtttatacaaggattcatcaagcaccatttgaatgtaaatatcggccattgtcacatcgaattcgtttgctttttccgtgttgcgggacttcatgagctcagtgtacgactttttctctttcataaagaatccccccaatgccttttttatagtatatggataacggccggaaaaatcaattaatttttataatctttagataactaatacttggaaatatatcgacatatcctgcaaattgacgaaaaaacgaaaatgatcattgtataaatgaggtgaaatgaaaaagaaaaataatatttaaatagtaatttaagactaaattacagctttaaaaggtgatttttagctatattcaaaaaaaacctgtcgttttccaattacagatgatagattattagtataaattttcaagaaaaggattggaggctgcacatcatgtgccagaaaacacacgcacccttagaaagctacgaagtaaatcgttcaaccatcgctgttttgcctgaggaaatagacggtaaaatggggtcgaaggtcattgaaaaagactgcattctgtatgtcagcatgaagccgattcacatcatcgacagaagctgccgctactttggctccagctatgccgggagaaaagcgggaacatatgaagcgattaaaatttctcacaagccgccgattatggtggacccttcaaatcacatctttttattccctacactttcttctgcaaggcctcaatgcggctggatatctcatgtgcacgttaaagattttcaaccgacggcatttgatgacacagcggtcacgttctcaaacggcaaaacgatggaactggaagtatcctatcattcttttgaaaatcaggtttacagaaccgcctatctcagaaccacttttcaggacaggatgggcagtcatatcccgaagcggcaggaattcatgctgtatccgaaagaagagcggacaagaatgatctacgactttattttgcgggagctgggggagagatattagagaaagctgtgatgtaaagggacgggccctttccttttgggaagggctttttcgatttacatgcccggatagagttgtatcgtgtccgtctgttggctatgatgatgtaaagagtaatgatatttcattttaggagagatgggcatggatgtgtttgcaaaatatgtatcagaaatcgataacccggatcaccgtctcaaagcagaggaaattttgtcgtggacggctgaccaatttccgaacttagaagcgcagatcaagtggaacaaaccgacatttaccgatcacggcacctatatcattatgtttgccgcggcaaaaaatcatttgagcattttacctgaaaaagagacgatggagcattttgccgatgacatcgcccaagccgggtacagcgcttcttcacgcctgttcagaattcggtggactgatccggtgcactatgatctgcttaagaagatcatcgaatttaacatcaaagaaaaagctgaaaatccggggttttggcgttagcggacgtgatgttgaaggaggaagacatggacgttttcaaagactatttatcaagtatcgacagccctgaccatcgtctgcgaatggaggaaatcctgtcgtggacgtctgagcaattcccgggtttaacaccgcagatcaagtggaacacgccgatgtttaccgatcacggcacctttattatcggctttgcggcagcaaagcatcatgtaagtgtttctcccgaagaagctggaattgcgcattttgccgacgacattgcccgtgccggctacagcgctacttcccgtttgttcagaattcaatggactgaaccggtgtattatgagctgcttgaacgcatgattcaatttaatatcaaggataaggcggactgctcagcgttttggcggaaataatgaaagaaatgttaaaaaaacaaccctgaggagggctgtttttttattaaacgtaatccgaaaaataagggatttgcgtatccggcagacccttacgaaacgcacgatgaaagaaatcgtgcgttcaaaattctttatttgacgacagacatgctgacggtgctgcctgacactgtcaatttggcaaaatcctgtgtatcaatcacaggtgtgactgctttattgtcgatcgtgatgttcgtaaaggctgtcgagaagtttgatttgatgtaagggcgctgatcctctgatgtgaccgcgacggtggcgagcgctttccattttgagacagagcctacattggtttgggcgagttctgagatgatgcggccggtgtatccgtcattattcgtgccccaatatgtggcgcgggtattgccgttcagatttttgtaaatggtcagctgtacggtgctgccgggccggaagcctttcgtataagtgaattggctttctccttccagataccggacctggccttgtccctttgaaccgactttcatgatcggtttccatacatgataggtgtcactgtactgaagcccgatatcagcctctgtgcctccggtaaatcctgagtaaatataggctgtcccatttgacacctgaatcgagcttggaagctgaattttcgtgacgagaactgagcccgtgctgttcagataggcccttccgccgattcctttactgagctgggacgccgcttccgccgtattgggactgatcaccccggaatatccgccgtacatgcgccgaatagaacggctgtagtgagaacacccgcaacaagcccttttttcatcatcatttctcctcctatcatcatagtcagatagcgctatcaattcatattataaaaggttttgggaaaaattccataaaagatatacgggcggacgtaaattaaaactattttcctatttatcttgtaaatggagattatttgaactatgatatgttcagtcatacaacatgattcaggaaaggggataggatagaaatgaaaaagacggcagctgtgcttttgtctttcggcctggtgttcggttgttcatacggagcggggcagacggcagaagcgaaaacaaaggtaaaaacgtatcaaaactgtaaggcgctgaataaggtgtataagggcggcgtggccaaatcgtcgaaagtgaaaaacaagggcggcagaacaaagtacaagccgtatgtatcaaaagcgctttataatgcaaataaaagacttgaccgggataaagactatatcgcatgtgagaaataaaaaaacaagcctctctaaagaggcttgtttttttaaatggattcggcggtgacggcggttccgtatccgattaattcggatgtgttctgtcctgcggtcagttcgaaccgcaggccgacgatggcgttcgctccgagctgctccgcctctctgatcagccgctctttcaccgcttttttggagtcttccagcatttcggtatagcttttcaattcgccgccgacgacagattttaagcctgcaagcaaatcttttccgatgtgacgggactggacgatactgcttgtcaccaagccttttacttccgtaatctgttttccggcgacggtttcggtcgttgtcatgatcatgcggctttcccccttcatgtgtcttaccgctattttatcattaagccgccttttcggctgcgctgatttgtttttttctgactgcggcgctgacggcaaacatgacggcaatgttcagaaccagcgcgatgatgcctgtattcatatccttaatgatctgcggaagaaacggaaagagggttccgacggttgattcggtcagcgtaatgaaggccactgttccgaccccggccgttatgccggcaaaagcgccgtggcttgtgatgaaacgccgcttcggcaggctgaataagagggcggggaaaagctgggtgacaaggctgtagcccattaaaagcaaggtgacgatggtatttccgcctttcagcgtaaaatatacggaaatcagcgcgataacgggtacggcgtattttgcgagccgtgagactttttcgtcagtcgtgccgggcagaatggctttgtacacatttttggcgaacagcgtgcttgaggccattaatatcattgaaccgggtacaagcgccgtcaggatgcccgccgatccgatcagcccgacaaaccagggatcaaaggttttcacagacagctttaataaggcgagatccgtgtccgccccttttaaaccgggcacctgcagaatcgccgcaaatccggtaaagatgacaaacagcaggacgagctgataaagaggcatgatgatcgcgtttttccgaaacacccgcggatgctccgccgaataggaagcggcaaaggtatgaggccacatataaaagccgagggcggtcagcaaaaccgttgagctgaaccaggaaacgctctgtccggtttccggcagcgtgagaaaaccgggttttgcggcgtcaatttgtttgaacatctccgtaaacccgccgtaataatgaatgggcagataaatacctaaatacaggacgatgcctaaaatcatgatatctttgacgacggatatccacgctgaaccgtggattcctgaaatcatcacataaatcgtgatggagacagcgccgatccagacagcggcggagggcggaatctgtccgtatgacgttgctgaaacaattaatccgagccctttcagctgcaggacgagataggggatgagggatgcgatgccgacgagcgatacgagaatgccgaggagcgggctgttgtattttgaaatgaaaaaatctgattgcgacatcagtttgtgttgtttggcgtaagtccacacggctggcagaagccaatatgacaaaatgtaggcaaggcagccgtacgcgataatataaaaggcggggcctccttttccgtaagcccatccgcttccgccgaggaatgtaaaggtcgtgtatatttctcccgccattaataaaaagacaaacatcgtgccgaagccgcgtccgcccaccgtccattgttcaaggtccatatgttttccttttcgggcccggattccgagatatacacaaaacaggagcacggcggccattacgggaaatgctgcattcattccgtctcacccgccttgttttctttgtccaatttgtaaacggcggccatcagaacggaagtcagcaccgcccagatgacgacatatgcgagaatgaaaggcattccgaaaacataaggcgtcacccggttggcaaatggaatgccggcgagaattccgaaaaagggcagggcggcgagaacatgaatcagtttcataacattcctccttttcattgaaaacagcgtgtcccgattataaagaaaatcatgtcgaatgtatagtgtgaatagtctgaattttattttttgaaaaggaaaagcaggcccggctgctttttaaatggtcgcaagagacaggtaatattccaataaggcggtgacctgttcccgtattctcgggttgaaataacggtgtttttcttcatagccgttaatggtgcatatataaagcgtaaatgcttcgtctctttccgcttcgtatattttaattttacgctttcttaactcttttcgaacatcactcaaatccttttgtgctaattttaaagagcagctgataagctgtttatagggttgttttaatttgaacgggcacgaatcaagcgcttcgaggtcccggttcaggatggcggccgccatgggcagaaacagccctttttcgatgagatcgcgggtgccgctccgaatgtcaggcataaatactccttctttcttaaaaaagagaacgtttgttcttattttatactcgcttacacgatatttcaagacggaaaatctcgtaaacattttcgttttttggagataatgtgtagaataaggatagacaaactcgttaaggagtataaacgttggagcattttttatcatatttgactgaggaacagctgacggaatggttccaaagctatagagctttcggcccggcggctgcggctgtattgccttttattgaagcgtttcttccgtttttgccgctcgttgtatttgtggtggcgaatacgaatgcatttggtttgtgggaaggtttttttctgtcatggctcgggtctgcgtcaggatcgatgctgatgttttatgccgtccgccgtttcggacagaaaagagctttcggtttcatccgcaggcatcagaccataaggcggatgatgctctgggttgagcggcacggtttcggtccgctgtttattttactttgcttcccctttacgccgtccgctgcggttcatatcgttgccggtctgtcacgggtgggggcgctgcagtttatatcagcagccgcgatggggaaaatggttatgatctttatgatcagttttatcgggtatgatcttcacgcactcattacacagcctttcaggatggcgggcgccataatggtgatcgcggtgctgtggtatgccggaaagcatatcgaacggcgtttacagacgagaatcagtcagcatgagaaagacggagggagacaggaatcttgaaaaaacgattttggtttatagccggcgtgcttatcgttgttttggccatacaattaaagaatgccatttttattgattataaagtcgaaggaatcagcatgaatccgacctttaaacaaggaaatgagctgatggtcaacaagttttcccatcgttacaaaacgatccgccgtttcgatattgttctgtttaaaggcccgcaccgcaaagtgctgatcaaacgtgtcatcgggctccccggcgagtcaatcgcatacagggaggatcagctgtatgtgaatggaaaacgggtggcggaaccgtttttaaaaccgttaaagtcatcattgtccgccgggagccatgtgactggtgattatacgctgaaggaaacgaccgggcgcaaaagcataccgaagggacaatactttgttattggcgacaaccgcatatacagcctcgacagccgtcatttcggtccgattaaggataaagacattgtcggagtcatcagtgaatcagacgccaagtgaacggcgtctttttttcggaaatgattgtcaaaaagcggaggaaagactataatgaaaattgttacgcgcgaaacaaaaaaggaggtgttttatttttcatatttttgttacgcgcgcaacaaaaatatgaaagagggctgatgaaatgaaaacacaggctgccattatcgggggaggtccggtcgggcttatgcttgcatcagaactggcgctggccggagtgaaaacgactgtcattgaacgattgaagaagacgatgccgtattccaaagcgcttatcatgcatccgcgcacacttgagctttttgccatgagaggcatattggaacgcttcttggaaaaagggacgaaggtgtcttccggccatttttccatgctggatacacggctggatttttctcggctggatacgaagcagaattattcgttaatgctgccacaggcagaaacggagcggatgttggaggagtatgcatcaagtctcggcgcagacatcatccgcggggcggaagcggtggctgtcacccagacggatgacggagtggagacggtgttccgggacgaaagcggaatccgcactcttcacagcttatatgccgcgggtacagacggagcggggagcattgtccggaaacaggcgggcatcgctttttcgggcactgatgccgacttaacaggaaccctttgtgatgccgctttgaaacatccgcccgaatcttcctttttttcaacgtgccggctggagggatcggttgtgattatccctcttacggacggacttttccgtgtcctcatcgtttctccgcatgtcccgcaaaagcggaaggaagagcgggtcaccgaagatgagctgaaagaagacctgcggcggatatgcggcactgatttcggattgagtgatccggtatggatgtcgcggttcggcaatgccgagcgtcaggctgagcagtaccgctccggccggatttttgtggccggggatgcggcgcacattcattttcccgcaggcggccaaggcctgaatacggggcttcaggatgccgtcaatctcggctggaagctggcggcgcaaatgaagggaaaagcggcgcctcatcttctggacagctatcatcaggaaaggcacagcacaggaaaagaagtgctgcacaatatcaaaacgcagataaagctcatggattttaccgagtcggggatggcattaagagaaacgatgaccgctttgctggattttcaggagtccaaccgtttattggcgggaaaagtatccgcgcttgatctgcattatgaaccggatgcggagctgccgccgcataccctgaacggaaaacgcctgccggatatcgaactgacccttcatgacgggcggccggcccggctgtatgattttctccgcaagggcggctttgtgcttctgtcattaagagggagcattcccgccggtattgatacggacagcgtggcggcagtcagggcggagcttgctgaaacacgtgccgattggaatgacgtccacaccgttttaatccggccggacggccatgcggcatgggcagccggcggctcgggacgtgaagcggaagaagccgttctggccggtttggagagatggggattattcatctgataacctttttatgcgcctgtgtgattgtttcttatgtaacaaaacgttatagtaaaagaaacaatcaatacggaagggtgactcagcagttggacagaagacagccagaccatgcaaaacacatgattcttgaagggctgaccgatatttttcacgagcaggagaggtgtcaggaggatatcagggcgtcgttggccggacggatggatgaactccgcgaaggaaacgggaaaaaattacaattgaccttgacggaaattcacattttgtcgtgtatcggagatcatgaaccgatcaatgtcacgtcaatagcggaaaaaatgaagacgacaaagccgaccgtgtcgagaagctgcgcgaagtttttggaagccggctttctgcgcagaacccggctgagtgacaataaaaaagaagtctatttccggctgactcctgccgggaaagagctgcattcccttcatcatgaatatcatgaattgataaaacagcggctcttggcgtttttagaccgctatacagatgaagaactgttatttgctgaacggctgttccgtgatctgtcagcaaactggcggtctgtaaatggcggcggagagctgttcaaataaaaaacacgcatatggatgcgtgttttttattcggatcatgttcctctttctgcccggcctctttcgccgtgtgcccgtttcagctgagaaaggtggtgcagcagccgatagaagggcggaagcatggcgatgacgagaacgatccggatgacctgaaccgcgacgacgaaagtcgagtcttcgtgcagggtgatcgaagtcgccgccatctcggcgatcccgccgggagaaaaggcgagaacagatgtaatcatggagatgcccgttaatttagaaaccgcaaccgcgctcagaatcatggcggcgattaatccgacggaagaaataaatccgacggtcagcactctcgtcacaccggtgaacatgcttttgtacatttttgatccgattgtggcgccgagaaaaatttgtgacagctggttcgcttccggcggccaccaggccagcatgtctttgcccgccaaggcggacacgccgatttccgcagcagcaacgccgatcatgctgccgagcagccaaggggcggggaatttcagccgttttgcgcctttacttgcaagccaggcagctaaaataaatccggccgttaacaagacgggaataaggcccggatgtgaagctcctgctgaaacggctccggctgatgtctgagccgcaccgttttgtttggtaaataagaaaatgacgagaaacggtattgtcatgacgaccaaaaggacgcgcgtcagctgaataaggcttacaatcgcggtgtttgcgccgacttcctgggcgatacccggcatggcggataaaccgcccggcgccgttcctacaaagcttgtcatcatgtccgtccggctgaaccgaaagagcacatatccggaaacaagcgccatcacgatagagaaaatcagcatgaagcctaccggaagccaatgctcccgtaaaaccgacagaacggacaggttcaatttctggccgagttcgatgccgaggatcatttgtcccgccgcaagccatctgcggtgaatccctcttctgtcaggcgccatgaacagccagccgggcctcgtcatggagaggatgcagccggcggcaagcgttccgagcatccaggcgatcgacatccctgtaagcgaaagaagaaacccccctgccgcactgatgagaataaaccagatatccgtaaggagatgtttgtctttcttcaatgaaaacccttcttcctgaaacattcatattaaattgttaagctcgttaaccttactattactatagtatagattttgagataaataaataatgaattatttctcataatccattcatttttcttatcgaaaacataaaaaaagctccggagatgggtgagtgcaccctactccgaaacctcgcccgcttttcctttccacacaagcgtcaatcccagaccgagaaataaaaccacacctgcgaacagaaacgggaagtgaatattcatatcaaataaaataccgcccagagccgggccgaaaatggtgcccaaactcgtgtatgttgagttcataccggcaacaaacccctgctgatttcctgcgatcttcgatagataagtagtcagtgccgggcgcagtaaatcaaacgcaaggaaaatgatgcaggtgacagcgagcacgggcaaaaaccctgacatcaccgtagaaacgaaagccagcacagcgccgatgatcagacaaagctgaatgacttttttctccccgaggaagttgacaagtctgccgaacgcgagcacttgaatgaggactgccacaatggagctgaacgtaataataatggcgatatcctttggcgtgaagccgaatttatggtttgtaaataagctgaataccgtttcgtacgccgacagcccgaatgccaaaacaaaaacgatgataaaggcgatcaagtagcttggatgaatcgactttttcaaatcttttaagaaggttgattctttggcgctttccatctgctttgcgcgttcttctttagttaacggctctttcagcataaagacagaggaaatcactgcgataaatgcaattcccgccgcaaagaaaaacggcatacgaacgccgtgatcggcaataaatcctcctatgccgggcccgatgataaaccctgtgctgatggcggcagatacatagcccatcgccttcgatctttcctgcaccgtcgtaatatctgcgacatacgctgtaacggcgggcatgataaaagcggcactgatgccccccagcacccttgcgaaatataaaatggagacatgtgtgcccaatccgaaggtcagctcggataatgcgaacaaaaacagtccggcgagaatcatgatttttctgccgaaacggtcaacccatctccccgcaatgggagatgcaattaattgcgcgacggcgaaggcagcgacaaggtatcccattgtgctgcccgtcaagtgcatcacattcataaacagcggcataacgggaatgatcaatccgatgcctaaaaacgcaataaatatgttgcttaataagatgatgagtacagccttttgttctctgatcggtttttgcatgttgtttctcctttgtcagctgtcattcagtttatcagcgttgatcgacccgtgaataaacacggagatggcttctttttgcaattcgattctttgctgaatggtatcgtttttatataacacatctaaaccgtagaagacggatagcaggatttttacttttgattcgacatgatgaatggaccagcttccgtcttgatttccttcttctaagatctctctcatcacatcgtcatattcaatatcaattttgttgagccgctttacgacctcctctgacgtaaacgcactcgcataaaactcttcacttgctctcataagcgggtaattgatgctcatccggctgagcagctccgcaaagcccgtcagcttttcggcagcatctttcagatcagcttccatttccctccacgtctcgatcatcacgcggtgatcctcttccatgatatgaagaaacagaaactcttttcctttaaaatggtgataaagattgcctttactgatctcggccgcctctaaaatatcccgaatcgatgtttctgaatatcctttttttgcaaataagtcacgcgaagcggatacgagcctgttcttcgtcttttcgctctttccggcaccgccttttgtatttgtcacttcacacagatcctttccgcctcattcatatcgttgtcccggcaaagcggggctcggttcgtttaaaaccgaccagttggtttattttattataaagggtttttgctgactatacaatgaagaagttatccattgtttagtggaagtataaaaacggctcgaaaaataaaccccattctctcctgttgaaagaacggggtttgccgtctatgactcccagcggggagcgtctgaatcgttattttccggtatttacctcggtgtagcttgtgttcggcgagtttgataccgttccccctgtatggtggaaaggagagtgggccatatcgtataaaaaccagacggcatgacgctgctcgtcaaatgccgtgcgggcaaataaccgtttcgcttccggatgcaccgctctatcggatgcctgtaaataaaaatcattcgttttctgctcatcataaaacgccgccctcagtccttctctgtatgtgtgcggacaatgctccgtctgtttcggcgtcaactgttttccggtaattgacgtatacagtgaagagaaagcgtgcatgtggcgcacttcttcctctctgatatgttcgattcgtcttctgatttctgcggtcggcgctttttcggctaatattgagtagcaaatcacagcgctgtattcaccgtttatggattttaccagatcctttataagcacagaatcgtcactgcagatggctgtataatgaaaaaaattctcgtgcattggactcacccccggatgtttatagggtattatacggcggcagcccgtgacatgtgcggatgtcatttttattcttgatccagcggcgatgtaatatggtcgtcgtatgtgtcgacaaaaagccggccgttgcttccgcgcacagcgtatacgacgtcttccggtttgaggtttctcttatccaattcttctctcagccatttttccgatacgtggttttcttccagatttttcattaccagccggccgtccataatcagctcaacggcaaagttcttttcatgtccggcaaagatgccgagatcctgtcttgtaacgggcgcaaattccggtttgacctccactgacatgctgccgtttgtttcaatgatggcagtctgaacctgagaaatgtcaaatacatcattttcacgaagctgctggttcaagtagtcgagggtatagcgcatctttttcatattatgctcaagtatttttccgttttgaatgataatggtcggtttgcctgcaaagaaacccctggcagttctgtttttcatagaaagatatgcgacaagataaatgataaccacaaaaatcgtgtaagcactgacagtaaaatgaatcggcagttttgtattaaacgacagattggctgtgatggcgccgagcgagatggccgcaatgaaatcaaaaagcgtcatctgtgaaatggtttgttttccgagtatacgggcgccgataaacagaatgctgaacgacagaatcgttcgcacaatcacttcgggatattctgacatcatatttaatcctttttttctttaatttggtcaaaaacgatatgttttaaaacagtcatcccgtttttaccagcagatgagattggtcattttcgtcaactttcgataaaatgtagaaagataaaaagagagggtcttctaatttgggtgttgagtttttagtaggcagatcggggagtgggaaaacgaggctgattatcgacagcattcaagatgaactgcgccgggagccgttcgggaaaccgatcatttttctagtcccggatcaaatgacgtttttaatggaatatgagcttgctaaaacgccggatatcggaggcatgatacgcgctcaagtgttcagtttttcgcgtttggcgtggcgcgtgcttcagcataccgggggcatgaaccgtccgtttgtgacgacgacgggtgtgcagatgcttttaaggaaactgattgaagaacataagcacgattttaaagtgtatcaaaaagcgagtgacaaagccggattcactgagcaggtggaacggatgctgacagagtttaagcgatactgtattgagcctgaagacgtccgccgcatggcggaaagcggaacggcgtcagagtatcgcggagagcggatgctgtctgaaaaacttcatgacttaggcattttatatcagcagatggaaagaagcctcgccggacactatctgcattcggaggactatttgacgctgctcgctcagcagattcctttggcggacgttgtaaaaggcgcccgtgtttacgtcgacggattctatcaatttacgccgcaggaattaagggtgctggagcagctgatcatgcatgctgaacatgtcacattctcgctgacggcggacagcccttcggcggaacaggcaccggatgagctcgatctgttcagaatgacgggaagcacatactataagctttatcagacggcaaaggaattgaatgccgatatttcctgcaaggaactgcatggcacgaagcggcatcggcatgtgccggagcttgcctgtatagagtcgcagtacgatgtgcgtcccgccgccgcgtataccggcggacaggaagcttttaccgtcatgcaggcgcaaaacagaagagctgagctcgaaggtattgcccgggaaattcaatcgcttgtccgggacggaggataccggtacaaagatatggcgattctcatccgtcagccggaagattataaagatttgctgaaggaagtgtttgccgattacgggcttccttattttattgacggaaaagcttctatgcagcatcacccgcttattgaattcatccgttcaagcctggatgtcgtgaaggggaactggagatatgaagcggtgttccgctgtgcgaaaaccgaactgttattcccgcttgatcagccggagcagaaaataagagagcaggtagatcagcttgaaaattactgtatcgcctacggcattaaaggggagcgctggacgaacggcgagcggtttgtatacaggcgcttcgtatcgctcgatgaggatttcgcgcagacggatcaggaaatcgagatggaacacatgctgaatgagacgagagagtggatagctgcaccccttatccggctgcagaaccggatgaaaaaagcgaaaacggttcaaagcatggcggaggctctttatctctttttggaagataccgatgttcccctgaagctggaccggaaaaggcagcgggccgaagaggccggaaacatgatcgaagcgcagcagcacggccaggcgtgggatgccgttatccagcttctcgaggagtttgccggcatgatgggtgaagatgaaatatctttggcgctgttccagcaaatgcttgaaacgggaacggaatcgcttcatttttctttaattcctcctgcgcttgaccaagtatttgtagggaatatggatctctcaagaatatacggcacgtcctgcacattcgtcatcggggccaatgacggcgttcttccggcgcgcccggatgaaaacggcgtgctgtctgatgatgaccgggagtggctgaaagcggtcggagtggagctgtcttccgcggggcgtgagcggctgcttgatgagcattttctcatctatatggcgctgtcgagtccgtctgaccgtctttatgtgtcatacccgattgccgatgcggaaggaaaaacgctcctgccgtcaatcgttgtaaacaggcttggcgagctgtttcccgatcatcaggaaaagctgtcagcggctgatcccgagcaggtaagcgaagaagagcagcttcagtatctcgtcaataaacaggtggctcagacgtatacggcaagtcagctcaggctgtggacaagagagtacgagatcagtgacgtatggtggagcgcatacaatgtgctgatgaaagagtctgatcaccagcgtgcgaaaaagctgttttcaagcctatttttccgcaatgaggcgaagcgtcttgaacggcctgtttcgcgccagctttacggcgagcatattaaaggaagcgtttcccggatggaggcgtttaatgcctgccagttttctcattttgcatctcacgggctgcaattaaaagagcggcagtttttcaagctggaagcgccggatatcggccagctgtttcactccagtctgaagctgatttcagaccggcttcgtgagcagaagctggaatggcgcgatctgacgaaagatcagtgccggaatttctcctatgaagcggtggaacggcttgcgccaaagctgcaaaaagagattctgctcagctcaaacagacacttttacgtgaaggaaaaactgcagaagatcgtcacgcgtgtttctggcatattaagcgagcatgcgaaggcgagcggtttcgtcccggtcggtcttgaactcggtttcggcggaagcggaccgctgcctccgctcactttcacgctgaaaaacggctgtacgatggaactcgtcggacggatcgaccgcgtggataaagcggaaagttcaaaaggcctgctgctgagaatcgttgattataaatcaagcgacagggggcttgatctggctgaggtgtattacgggctcgctctgcaaatgctcacatatcttgacttatcgattacacattctgcggattggctcggcatgaaagcgaccccggcaggcgttttgtatttccatatccatgatccgatgattcaggccagtctgccgatggggcttgatgaaatcgagcaggaaattttcaagaaatttaaaatgaaaggccttctcctcggtgaccgggaggcgatcagcctgatggacacgactttggaggaagggcgttcaaatatcgtcaatgccggtttgaaaaaggacgggtctttaagatccgactcagcggcggtcagcgaacaggactttcatctgctgacagaccacgtgcggcggacatttgaacaggcgggcgaagcgataacggacgggcttgtgtccattaccccgtataagctgaaagataagacgccttgtacgtactgtgcgtttaaatcggtttgccagtttgatgagtcgcttaaggaaaatgaataccgcagcctgaaagcggaaaaagacggcaccatactggattggctgaaaaaggaggcggatgatgatgcaaattcctaaaccgaaagacagcatatggacggatgaccaatggagcgccatcgtttcttccggccgcgatattcttgtcgctgccgcagccggatcaggtaaaacggccgtgctcgtggaacggatgatcagaaagataaccgcggaggaagatcctgttgatgttgacaggctccttgtggtgacctttacaaacgcctcagcagcggagatgaagcatcggatcgctgaagcattagaaaaagagctcgccaaaaatccgggatctctgcatatcagacggcagctctctctattaaatcgggcgagcatttcgacgcttcactctttctgtctgcaagtgcttaaaaaatattattatatgattgatcttgaccccggttttcgcatggctgaccagacggaaggcgaattgctcggagacgaagtgcttgatgagctgtttgaagatgaatacgcaaaagggaatcaggcgttttttgagcttgcagacagatatacgacagacaggcatgatctggatcttcaagaccttgtcaaacgggtgtacgagtattcccggtcgcatcctgacccggaagcgtggctgcagagctttgtccgcttgtatgacgtgacggaagaaagcaaaatggaagagcttccgttttaccagtatgtgagagaagatgcggaaatggcgctcttcggggcaaaacaaaagcttgagaaggcgcttgaactgacaaaagcgcccggcgggccggccccgcgcgctggtaattttctggatgaccttcagcagatagaagagctgatcagctgccggcatgacttcgatgcgctgtatgaacgggtccccgcagtctcatttaagcgggcgaagccggtaaagggtgatgaatttgacaaagcgcttttggacgaagcgaccgatttgcgaaacggcgcgaagaaactgatcgaaaagttaaagaccgattactttacaagaagtccgcaagatcacttgaagagtttaacagatatgaagcctgtcatcgaaacgctcgttcagctcgtgatatcgtacggaaaacgatttgaagcggcgaaacaagaaaaatcaattattgatttctcagatttggaacattactgcctggcgattctaactgcggttgatgaagaaggccggcgggtgccgagcgaagcggccgtttattatcaagaccagtttcatgaagttctggttgatgaatatcaagataccaatcttgtgcaggagtctatcctgcagcttgtgaaaagcggggatgaagaggcgggaaatctgtttatggtaggcgacgttaaacaatcgatctaccgtttcagacttgctgagccgctgctgtttctcgggaaatataaaaggtttacagaaagcggggaaggcgcggggcagaaaattgacctgaaccaaaatttccgcagccgttccgatattttggacagtacgaatttcttgtttaagcagctgatgggcggaaaaatcggcgaagtggactacgatgaacaggcggcattgaagctcggcgcatcgtatccgccgaatgacgcggcaaaaacggaactgctgctgattgacagcgctgatgacgcagacagctccgaggatgccgaagactttgaaaccgtgcattgggaagcgaaagcgatagccggggagatccgaaagcttgtctcgtctccgtttaaggtctatgacgggaaaacaaaaacacaccggaatatccagtaccgggatatcgtgattttgctgcgctccatgccgtgggcgccgcaattaatggaagagctgaaaaaccagggcattccggtgtacgccaatttgacgtcgggttactttgaagccgtggaggtggctgcggcgctttcagtcttgaaggtgattgataatccgtatcaggatattccgcttgcttccgtgctgcgctcgcccatcgtcggctgtgacgaaaatgaacttgcgctgatacgccttgaaaagaaaaaagcgccgttttatgaagcgctgaaagcatatatagcgaacggtgacaggcatgatgaactgtatcaaaaactgagaaccttttatgacagtctgcaaaagtggcggtcattttcgacgaatcattcggtgtctgagctgatttgggaagtataccgcgataccggatattttgactatgcaggcggcatgcccggcggaaagcagcgccaggccaatctgcgcgtcttgtatgaccgggcgcgctcgtacgaagcgacggcgttccgcgggttattccgctttttgcggtttattgaacggatgcaggagcgcggcgatgatctggggaccgcccgtgcgctcagcgagcaggaggatgtcgttcggctgatgacgatccacagcagcaaaggacttgaatttcccgtcgttttcaccgctggactcggcagaagttttaatatgatggatctcaacaaatcatacctgcttgataaagagctcggtttcggcacgaagtatattcatccggaactcagaatcagctatccgactcttccgcttgtggcgatgaagaaaaagatgcgcagagagctcttatccgaagaattgcgcgtattgtatgtggcgctgaccagagcgaaggaaaagctgtttctcgtcggttcctgcaaaaaccgggaaaaacagctggccaaatggcaggcccaagcagaccgggctgattggcttctttctgaattcgaccgctatcaggcgtcatcttatttggactttatcgggccggcgctcatccgccaccgtgacatggaggcgcacaggacgccgggactttcttcgtctgaggatatcgcgcgcgacccgtcgcgttttcacatccggatgctgcagcaaagtgaattgctggaagagaatccaaaagaacgtgctgaagaaaagagcaaacgtctcaaggcgatacagcagggcgagccgattcctggttcgttttcatttgatgatcaggcgcgccgtctgcttaaatgggaatatccgtaccgagagctgacggctatcagaacgaagcagtcagtttctgagctgaagagaaagcaagagtacgaggatgaatacagcggccgctctctcatcaaaccgtcaggagacacgcttttatacaggcgtcccggttttatgatgaaaaaagggctgacagccgccgaaaaagggacggcgatgcatacggtgatgcagcacataccgctgacgcacattccgactgccgaagaagcagagcggacggtccggatgctttacgaaaaagagctgctgacagaagagcagcaggaagccattgatatagaagaaattgtccggtttttcggaactgaaatcggtaaagaccttctcggggcgctgcggattgaccgggaagtgccgttcagtatggcgcttccggccggcgaggtgtacaaggatgccgaaacggccggtgaaccgctgctcgtgcaagggattattgactgcctctacgaaactgcggacggtctctatttgctggactataaaacagatcggatagaggggaaattccggaatggatttgaaggcgcggctccgattctgcaaaaaagatatgaaacacaaatcgaattgtatacaaaagcggttgaacaaattacaaaaacgaaagtgaaagggcgtgcgctctatttcttcgatggaggtcacgttcttacactgtaacgagatccgaagctcctttttggagcggatctttttttctatcaaaaagtgaggtgaatgcggtatgcgcattttacatacagctgactggcacctcggcaaaacgctggaaggcagaagccggctgagcgagcaggccgaagtactggaagagctgaataccattgtcaaggaagaaaacattgatgcggtcattatggcgggggatgtattcgatacggtcaacccgcctgcgctcgctgaacaattgtattacgaaagtctttccgcgctttctgacggcggaaaacgcccggttgtcgtcattgccggaaaccatgacaatcccgacaggctggcggcggcttctccgttaacaaatgagcgcggcattcatttaatcggctatccgcggacagaacccgtccatattgaggtgccgtcggcggacgagctgttagccgtagccgcgctggcatatccgtcagaggcgagattaaacgaagtgctttctgatacgtttgaggaaaagcttcttcgcgatcattacgatgtgaaaatcagagaggcgtttgctcacatgtgcggactgtgccggaacgatgccgtgaaaatcgcggcgagccacatttatgtcgcggggggaaatcagaccgattcagagcgtccgattgaagtcgggggcgcctacacggtcgccgctgacagcctgccggctgatgcggcttacgtggctctcggccatctccaccgtccgcaaacgatcaagcgcgccaagacggctgcccgttattcaggctctccgctcgcatacagcttttcggaagccggttatgccaaatcggtgacagtggtagaagcgaagcccggcggagaagcgaagtgggaagagattttcctgtcttccggtaaaccgctcgtcaaatggaaagcgcaggggctgagcgaggttcacggctggcttgatgaagggcgtgaccggaatgcctggatcgatcttgatatccatttgacggatcagctttctctcgaggaaattcatcggctgagaaaggcgcatcccggctttatccatatcaggccggtttttgaagaaaaagagaccgaaaatgaccggattgaagtgaaacacacatcaattgaggatcgatttaagaagttttatgaaaaacaaacgggcggcggcgtgccggatgaggagatggtcaagctgtttttagagcttgcgtcagcagatgatgaggaggatgcgacatgaagccgattctgttaacgataaaagggctccacagcttcagggaggaacagaccattgattttgccggactgtcaggagccggggtgttcgggattttcgggccgaccggaagcggaaaatcgtcgatccttgatgccatgacactcgctttatacggaaaagtggagcgcgccgcaaataatacgcacggcattctgaatcatgccgaagatcagcttgccgtctcatttacattcgcgcttcaatccggccaccgggtttcctacaaggtcgagcgcgtttttaagagaacggatgaaacgaaagtaaaaaccgccctctgccggctgattgaaatcaaagacgaacaaacggtgctggccgataaagcgaatgaagtgaacaaaaaggtagaggagcttcttggcctgaccattgacgactttacaagagccgtcgtgctgccgcaaggaaagtttgccgagtttctgtcgcttaaaggcgcggaaagaagacatatgctccagcgtctgtttaatctggaacagtacggggacaggcttgtcaaaaaattgcggcggcgggcgcaggaagcggcagcgaaaaaaaatgaaatgctggccgaacaatccggcctcggagacgcaggagaagatgcgctgaagcaggctgaacagcagtttcacgaagcgaacgaacggcttgaagcagctgagaagaaacgggtccgggcaaaagagcgttttgaaaatcaccaggaaatttggaacttgcagacagaaagagatgaatatgagcgccgggagaaaaagcttgaggaaagacgcccgtacatcacggatttgactgagcgtcttaaagaggcggaaacagctctcgcccttgagccgtacgcagaccgctgcaccgaagccgtccgccggaagcagcgagccgaacaggaacacgaactggccaaacggaaatcagaggcggaaaccgtttcatttacccggcaaaatgaagcctatgaagcatggcgcgcccataaggccgaacaggagccgaaacttgtcaaggaagaagagctgtatcaaagactttcagccattgaacaaaaactgcttgaagcgaaaaaagaagcggaaaaaacaaatgcggagcacagcaaaaaagaggaagaatacgaagccgcctcgaaacagctggccgcagtgaaagaccgcctgacccgcggccaaaacaggcagaatgagctgaaagaagagctgaaagcagttcaagtgaccgcagatgaacggaaaaaatgccagaccgcagcacagctggcggcaggctttcagcagacacaggaacaaatcacgaaagagcgggccaatctgacaacgcagctgaaaaacgtggagaagctcaacggagaaagcgagtcgctcacagcgaaagcgaaaacggaagaggaagacattacgcgcgcttatcaaacgctgcaaaccgtttaccatatggtctgtgaaacggaacgttcactgaaagccgcagccgaacgggctgaaaaaacgcaagccgatctccgcaggcgctcagaggaagcgagaacggctgcattaacaaaagaattatcggaaaaactgatcgaaggaaagccttgtcctgtatgcggctcgacgcagcatgaccgcccgcgttccgctcatgaaacattctcgcctgataccgctgtgcaggaacatttgcagcaggtggaagcactgctttctgaggcggcggctctttctcaggaagtgctgacagccaaggttgcattagaagaacagtcggggcgttttaccgaagaatgtccgtttctgcaaagcgcccgggttccggagctggaagccgcttcttccatcagcggacgcccgcttgatgaagcgttcagcgccgtccgcttggaatggaaacaaatgaaacaggatatgctgtcggtaaaagagaaggtcgcaagactgatcagcgcgcatcagcagacggtaaaacaagctgagcagcttgccgaacgaatccgctacgaggaaaaagaagccgaccgtctcagacattcattagaagagcttgaatcgctgtcagaaagccgattgaatcagtacaacgaagtctgcggtcatattccgccaaaccggattgacgcctggcaggcttcgatagatgagaaggacaggcaggcagaagaatgtgagaagcgcattgaaacaagcatcgcattcctcaaggaacatgaagaggagaaagaacgcctgcaggagatgaagcatcggcttgaacgggaacggctcgagcttcactatgcgtctgagcgcctgcagcaggtgattgacggatatgaacaagagctcggaacagcagctgaagaaacatcaatttccgcaaagcttgaagcggtgcggcaggaattacagctgttaaaatcaaaagaacagtccctattcgatgcgctgaagcaggcgcagcaatcgctgaatgacgcaaaaggccgggaatcagggagtctcatgtcactcagggatgctgaggcctctcttgagaaagcgcaaaacgactggcgcgtgaggtcaaaagacaccgggtttaccgaaccggaccaagttaaaaaaagtctgcttccgcaagggcgtgcagaggaaatgaaaaaagaaattgatgagtttctggacacctcaaaacagctatcggcaaatatcagccgtgttactgataaattagccgagcgccggatatcggaggaagaatggacagcatccgtttctctgctgaagcaggcagaggctgagtcaggcgccgccatggaggaaaaaggagcacaggcaaaagccttcgcggttatgcaaaaacagcataagcgctttaaagagattgaagccgaactgaaaaactggcagacacagattgacaggcttgataagctccagtctgtatgtaaaggcaatacattcgtcgaatttttagcggaagaacagctggaaagcgtggctcgggacgcctctgcccgtctcggagcgctgacaaggcagcggtatgccatattagtcgattcagaaggcggtttcgtcatgcgtgatgacgcgaacggaggcgtcaaacggcccgtatcaagcctttccggcggggagacgtttctgacatcgctgtcgcttgcgctggccttgtccgcccagattcagctgcgggggcaatacccgctgcaattctttttcttagatgaaggattcgggactcttgaccaagggctcttagacaccgttgtcacagcgctcgaaaagctgcaatcggacaacttatccgtcggagtgatcagccatgtgcaggagctgagagcgcgtctgccgaaaaaattaatcgttcatccgtccgaaccgggcgggaaaggcacccgggtcacattggagatcatgtagaaaggagaaggaattatggccgattctgccgagggtacatgtgaattatgcggccgccattatgtgcggctgacggagcaccacttaacgcctaaggaagaaggcgggacattccttccgaccgcaatgctctgcatcccttgtcataaacaggttcacgcgctctatacgaatcaggagcttgcggcaaggctcgcgggaatagaagagctgcggcgtgacccgaaactcgcgcggtttgtgaaatggatcagaaaacagccgccggaaaagcttgtaaaaacaaaaaaagcaaatgaacgaaaataacgctgaaccaaaagcagccctcttctgaaagagcggctgctttttaggcgtttccgaccacattttgatcgctgacatcggggtctatatagtttgtcgcattgacaacgttgtttaataacaggaaatctccggtattgcctgctcccgaaccgagcgcagatttagaagagctttttggagaaaggtaaaaggaatcaccaaagtttacgactccgcccgatatggaattgatagctataggtccggtaattgctggcataaacgacaccctttatagaagtctcaccgtcattatatgtcagggctgctgtgattgtgagcttggcgtgaagatctgcctaatatgtttcagccgcgaatctcccagaacgaccgacgtcgatccgatttgaaccacggacgctgacgataccccttgaactttcacattccttacccgaattgaaggattttcatggcagaatgcgctttggactcccgtttccggtaacggcatgacggccggctgccgaaagatctggtattcttttttgttaaatgagccttcatcatctctgtatacagcaagactgcgctgatcggccaatactttgatccgcatattgatttcattcgtatcgcctgcttgaaagacactcgcaatcccgactgaattgattttggcgttccggaggcgtgaaatgcgctttaacattattccggcgccagcggcacataaggcccgataataagagattccggaggcgtgtcaaagatggaagacagatagacggaatcggtgtcgccgattaataataaggaagaactggatacaccagtagaccggatgtcgccgacttcaatattccggttaatcactgtaaaaatcatgacggatcatcacctttcatttcaccaggtatgtgtttaataaagtgctcgacggccctgacaatatcacgcttcacatgttcggcaatctgctcggcatattgcgcgggcgccgtattttcttctttcgggacatgggacagataatactgaatccggctgtccatctgctttctgatatcttcaataatatgatatttgttcgtttcgtccagcctgctctcatactgagtttcgagctgctctaaaagcgcggggatttcttcattcaggtacatatcgacgttttgacggatttgctgcatttgctggcccgcctgttcctgctgcatcattccgacctgcggagatgtctggccgacttcgaagttttgcacggcattcggatcagtcggattcaatccgatattcagcgttccttccagccgttcaattttcagctgatcaaatttatactcgagccgatcgattcttgtagaaggctgctgcttcagcgttgaaatttcattttggaattctttcagctgccgttcgagctcctgaatctgctgcgcctgctgctggacgaaagaatttaaattctgcaggtaggatgaaacggattgatcatacatgacattcacctcgcgtctcgtttccttcattaaaactaccggcttggcggctggagcggtacaaatgatgaggtgccgggacctccccctgttgttacagcctgctgccccgcggtgacaggcggcgccggctcaacataactccctgtgttgtacagattggaaagagatttaattgaaccggcgcttccgatttgcagtatggaggaattgctgacagattctacacgcatgtaattgatatggatcgactgattgacgtaaaaattcatacggcgcctcctttatgcgtttcctgccatcggctgatcgattacatcattatcgtacacattcgttgaattcctgtaattcgtcagtgtgagattgtctccggtattgaagctgcccgctccggcaaatgtcttaacctctgcttttggagaaatggtgatgcagtcgcctatatgaacgactccgctcgtaccgacggcattaattttaaacgctccgacaattgcgggcatacgagcacatccttttcgtgaagattttcatgactgcactccaggagcttatctgggctgcctgcctaaaatagcttatgacaaatgcacatttttgtgagcggaaaaaactttagacgtaaaaaacaccggcgctttacagatgccgggtcttatacataaatgatacagatttatatacatatcacgtttatgagaaagcctcttttctttcgcggccgtgctgaatctgtgcggccgggttcggcccgctgtctttcgtttgttggatgagcccgccccggcacccgtttaaaaggctgtccagctcctggctgcacctgatggtctccgtcgcattgattccgaatttttgcgctgtctcgaataaagttaatcttttttcttcaattttgttcatcgtgtgatctccaattctcgattattttggaaaacataggatgataatagtataacccattttggccaagaaggttttatttcgtcaatatgactaaaaaagtgacaatttttgatactcttttacacttattttcagcctgtttaaaagagggatttcccgcccggaggaagaatacataaaggaatgccatttaaaaatgatgggggattaacatgaaatttgcaacaggggaactgaacagccgaaaatttgtcggtctgattattgatgatgacaaaatcttagatctgcaaaaggctgaaaaaaaattgtttgaacttgagacgattccgggttcgctgatcgagtgcattcaaaaaggagataagttcgtcgcgcatgccggacagcttgcggaatgggcgaaaaaaccgaatgacgagtcgggttcatttatgtatgcgctgtctgacgtaaagctttgcgcgcctattccgagaccttcaaagaacgtgatctgcatcgggaaaaattatcgtgatcatgccgttgaaatggggagtgaggcggatataccggagcatcccatggtttttacgaaagccccggctgccgttacaggccacggagaaacagtgaacagccacttggatgtaacggagcagcttgattatgaaggggagcttgcggtaatcatatcaaaaagcggatcgcacatctccaaagaacatgcgcttgatcatatattcggctatacaattgtaaatgatatcacagcgcgcgatctgcagaaaaaacataaacagttttttatcggcaaaagcctcgatacgacatgtccgatgggcccggtcattgtacataagtcggccgtcagtgatccgcaaagcctgaaagttgaaacgcgggtgaacggagaactgcgccaatcaggatcaacgggtgacatgatttttccgatagctgaattaattgagacgctgtcaaaagggatgacgcttgaagccggtgacattatagcgacgggaacgccgtccggtgtcggaaaagggtttaagccgccgaaatttttaaagccgggggaccgcattgacattacaattgaaccgatcggcacgctgtcgaaccaaatcggataattgtgtgtctttcgcacgattgataatgctccgagcggcttgttgtggtaccataaatgaggcagattgatctgatagggggaattgaacataatgacacattggcatattacttcatgggtcgttgcgcttatcctggtgtttgtcagctacgggctgtacggtgccggaaaagcgaagggcgcaaaaattacgcatatgattctgcgcttattctacattattattattctgaccggagctgagctttttgtccgttttgcgaattggaacggagagtacgcaggaaaaatgctgctcggcatcattaccatcggactgatggaaatgctcgtcatccgcaagaaaaaaggcaaatcaaccggcggactgtggatcggttttattatcgtgctcgtcctgacggtgctgctgggccttcacttgccgatcggttttcacgtattttaatcaatcgcttgaaaaacccggatgcatccgggttttttttagttgcgcaactgggccgctgaatgagaaatgccgtgttgatgaggcgaaagagatgtccaggatgccaaaagcgtcaatcactcttgttgccgcaaaagctacggctgtgaagggtaaaagcaaacgccggccgtcaatcagcgtgaaaaacaaagctgaatacatcaggcggcacctatttaaaaggtgccgcctgtttgttacgcggtgccgtcttgtcttgccgctgaatacataatggagcgccgcccgtcagatgccgtccattcaaatctgtcgtgtttacccgagctgccgcggtgatgctgcagggcgcattgtgcgtcatccgccgagaagtgataaaacgaaacgccttcaccggaaaacagcgcctgattataggaaaatacgcaatcatatacagacaggccgaacccgtgcagatggctgagaaacagcagaaacgtttcatcgtccagcgaatcgagcaaggttaacagcggccgtttgaccgccttttcataacggatttcttccccgccgagcagggggatggtgtctgcgccgatttcggccgaaccgccgcaaatccgtgccggctgccatctgccgtcgcgtttcatcaatacgtctgcgtttccgagactgtctgcaagcaggatatcgccttcatcgttttcgacgaggcagatgccgtcctctatcatcagtgtgccgcgcccccatttgtttttttctgagaaaagctgttttcgtttcataaccgtgcccgtctcctttgtttgtttcttctcttccgttctttccaaatcgggcttgtctcatacaactcttagtgggacaaatcaactatctgcgtttctttgcataaactgggtaaagtgctgatagaaacgaatttgaaaccgacagaaacgggattggagctgatatcacatgtgtggaattgcgggttgggtcgattttcaaaagcagctcgtccaagagaaacatattatgaacaatatgatagacactctttcaaaacgagggcctgatgattcaaacgtctggggagagccccatgttttattcggacataaaagactttcggtcgttgacattgaaggcggccgccagccgatggcctgcacgcatcaagaggaaacgtacaccatcatttataatggcgagctgtataacacggaggaattgcggaaggagcttcaggcgaggggccaccgttttgagaggacctctgatacagaagtgctgctgcacagctatattgagtggcgggaggagtgcgtggaccgcttgaacggtattttcgcttttgccatctgggatgaaaagcgaaagcggctcttcggggcaagagaccggctcggcgtcaagccgtttttttataaagaacacggctcttcctttctgtttgggtcggaattgaaagccattcttgctcatcctgatgtgaaagcccgcacagacagcggcggacttgcggaagtattcggactcgggccgtccagaactccgggctgcggggtgtttaaaggaattcacgaggtgcgtcccgcccatgcgttcactttctcaaaggacggtttgtccatatggcgttattggaatgtaaagagcgaaaagcatacagacagcttcgatgaaaccgccgctcacattcggtacttatttcaggatgcagtgacacgccagctcgtatctgacgtgccggtttgcacgtttttatcaggggggcttgattcgagcgcgataaccgcgatagccgccgctcattttgagaaacaaggaagagatccccttcatacttattcaattgattatgaggagaacagcaaattttttaaagcgagcgcctttcagccgaatgatgacggcccgtggatcgataaaatgacaaatgcattcggcacacagcatcataagtgcgtgattacgcaggatcagctggttgaacatctggaggaatccgttctcgtcagagacctgccgggcatggctgatgttgattcatcgctattatggttctgccgggaaattaaaaaagattttgtcgtgagcctttccggagaatgcgcggacgaaattttcggcggatatccgtggtttcacaccgcggcagaagaagacggatttccttggatgaggtcgactgaggagagggtcacgctcttggatgaaaagtggcaaaaacggctgaatcttagagaatacgtgaatgcgagatatgaagaaaccattgcggaaacgccgctgttagacggtgagacgggaacagataaagcgagacggcagctgttctacttaaatatgctttggtttatgaccaatctgctcgaccgcaaagaccgcatgagcatgggcgcaagtcttgaagtacgggtgccgttcgccgaccacagacttgtggaatacgtttggaatattccttgggaaatgaaaatgcatggcagccgggaaaaaggcattttgcggaaagcgcttgaaggactgcttcctgaagatattttgtaccgcaaaaaaagcccttatccgaaaacgcatcacccgaaatacacgcagggggtcacagaatggctgaaaacgattttacaacagaaagattccgtgcttcacaccctgcttgacagaaagaagctggaaatgctgctggagacagaaggttcatcttttcaggtgccgtggttcggccagctgatgaaaggcccgcagctgatcgcccatcttgcccagatccatacatggtttgaggcgtaccgtatcgatatagaagaataacagtgccgcgaccggtttccgctgaaggatatcggtctttttattgtgaaacatatggtacactaaaaaacagaggagtgataccatgaccgaatacgaaacatgcgcccatcttgccgaggtgcactttcctttatataaacggactttctcatccctgccgccaaaaaacaggcgggccgcatgggcggtgcttgctttgtttcacgaagctgatcggcttgatatgcaggaacttgggggatttgaacaggcggcacaagactttctgaacggggcacgcgccgacggctttttgtgggaggcgctcactgatgtgcggcagcaatttgcacttgaagaagagccgttgcgtgagtttatcgccggccacatctctgacagagaaaaagtaacgtatcaagagtttgatgacctgctgatgtacgcgggccaaacaggcggagccctcggcctgcttctgctgccggtttgcgcgcgccggaaccaagagaaactccgccatgcagccgtttcattaggagcagccattcagctgacccgggtgcttctgagggtccatacggatgagtggtcgaaaaagcgtctcccgcgccaggtgatgatgcaattcggctatacggaagaagagctggagagccataccgtcaacaaagcttttatgaatgtatgggagtacatcgcattcgaggccgaggcgtatttcgaggaggcgtctgaagagctggagctgtttccgttatactcaagacccgccgttaccggtttgctggcacattaccggtcagagctcggtgacatgagaaaacggctttcgcaggcataaaaaaacgcccggcttcttaacgaagctcggggcgtttatgcaatccctttttgaatccaaatccgcgaccgccatcttctgtacataagaatgcctctgacccattcatccgcgataaatgaaatccagatgcccataagccccaatccgaaatggatgccgaacagataagcgagaggcagtccgataccccacatggaaatcatcgccatgtagacggggaattttgcatctccggcagcccgcagcgagttgatgataatgacattaaatgaacggccgggctcaagaatgatcgtcatggcgatcagcatgctcgccgtcgcaataatgtcagggctgcttgtgaaaattccgatcagctgctttgaaaacaaggtcatgatcacggatgtcaaagcggcaatgccaagcgcccagtacagacttttcatgcagcggtcataagcgtcgtcaaaccgtttggcgccgatatatctgccgatcaaaatctgtgtgccctggctgatcgccgttccgaacagcaggataaacatggtgatgttttgtgtataaacctttgttgtaagcgcctgagcgcccataatggcgataaaataagtgacaaccatttgtgaaatgttataagacagctgttcgccggcagacggaatcccgattttcaggagtttccgcaagtgctctttatggacgtgaaaaatcttttgccatgtcagaccgagtccgatgcgttttttgacgatcacaatcatcgcgatgagcccgatgatccgcgcaaaggacgttgacatcgcaacaccggcgacgcctaacaccggaaggccgagcggcccgaaaatgacaagaaagtttccgccaatatttaaaatattcatcccgatcgtaacgaacatcgtatccttcgtatgaccgtagctttttaaaatggcgctgaacgtcataatcaaagcctgaatgaaggacagcccgccgaccacctgcaaaaagactttggcatccggcatcaattcattggaaagacccatcacatgaagcagcggaacggccgcaaaaaatatggcggcgctgatggcgagactgatgacaaagttcgctcctattgatacataagccacttcctgcgcctcttttttctgtttagatcctaaaaactgtgaaatcacaattgtcgtacccgttgcgataaagctgaacatcacgataattaaatttaaaatctgattgctgacacccacggccgccacactgttgtcagagtattggctaagcataagagtgtcggcgtttcccataaacatatataatgaaacctcaataaatatcggccaagtcagcgcgtataatgagagtttgtgatcagaggattgtttgaatgcagcccgttttaaaatcgcttgtttcatttcttttaacccctttcctgaaaaaatcaacgtttaaaagtgtacctccattttcttataataaaaagggagagaaacgaaacttcttgcaaaaatccgacttaaaaaggagggccggaaatatgtcctttctcgagttcacagtccctccgttcccggtctttatcgctgcgggagaaggagtgttcaaaaaaggcgaaacccatgtgagacgggtcttcccggtgtttgatctgctgtatgtgaaagaaggcgtcctctacattacagaagacgaaaacgccttttccgttgaagcgggagaatatattctgctttctcccgggcttgaacattacggaacaaaaggcagtgaagaaacgacatcctattcgtggcttcattttgaaggagcggattatgaggtgacggaaaccaccgggaacaactggtcggagctgaggcgaaaaaaagggagctttgaagagccgtcccgctaccgcttgtccctgccgcaaaaagggaaggtgagacgcccgcagtttatggccgggcaattcagtgtgctgacagatgaaagcgccgagaactccgacctgccgctcagaaagcagattctgtttgaagagctgctgctccatcttcagaaagaagcgttccaaatcccgtccgcaaaggaaagagtcgcatgggaggccgcccggtacctgcaggagcactatcaggagaaaacaaccatcaaagcgctctcttcggcacttcattacaaccaagactacgtgacccgctgcatgcagcaggtgctcggcgtcacgcccggccagtatacgaacaaagtcagaatgacggaggcgaaacgtcttttgtccgcaaccaatgacaaaatgggggcgatcgcggacgccatcggcatggaggacccaacctatttttccaaactgtttaaacagattgaaggcatttcgccgcttgaataccgcaaattcgtaagccggaaaacggactgacctaataccagagaacagaagagggatcggtaagcatgaaaatgacaatttacgacgtggccgaaaaagcgggcgtctccatctcgaccgtctcgcgggtcatcaacaatacggggaggatcagtgacaaaacccgccggatggtgctccgtgtcatggaggagatggactatcatccgaatgttcacgcatccgctttgacgggcaaaaagacgaatatgatcggcctgatcaccccggacatttcaaacccgtttttcggggaactggcgaaaagcattgaagacagcgccggtgtacttgggtttcatatcattatctgcagcaccgattatcagcctgaaaaagaaacgaagtatttttcgatgctgcggcagaagcaggcggacggcattatattcgcgacgggacttgatcatgatgacagcgtcacggcgcttgatgatattgtgaaatcgggcatcccgcttgcgatgattacgcaggataaaccgctcgcgccgatggacgtcgtcattatcgatgactttctcggcggctatacggcggctgagcatctcatatctttaggccatgaaagaatcgcctgtatcgtcggaaacggttcgaccacgggtgaaagagacagaatcaaaggttttcaaaaagcgctgcgggaagcggggatgacactagatgaatcgctgatcataccgacggaatattcgctggaaagcggaaaacaggcagcgggcgagctgtttgacagagaccttccgaccgccgttttcgcctttaatgatgtcttgtcatgtgcggcgatacaggcggcgcgctcccggggcattcgggtgccggaagacttgtccgtcatcggctttgacaataccattctcgctgaaatgacggcaccgccgctcacgacgatttctcagccgatccgcgaaatggggcggcgtgtcgttgaacttctcattgatgagattcaagggaagaaaaaaacaaaaagcaaaatcattttatctccggaactcgtcatcaggcattctacggcaccggtaaaaacgcgccctcagcgataaggcgcgtttttttctgtgaaaaacattgtcaaacgagcgaaaagcattgtaaaattaaaacagcttttgagaaagcgcttgcgcaaatactgcggattgcaagcaaagaaagcaaacagcttgagttgtaaataaagcgctttcaaaataatgatttctgtttaataagagaaaccgcttgcgccattacggcatgcggcctcaagaaaaaaggagcggtgatagatgacagatcaagtcaggtgtgcggtgctgggattaggacgattagggtattttcatgcgaagcatttagccggcgaagtgcggggagccgagcttgcggccgtctgtgacccgatgaaggggaaggcggaagcgtgtgcgaaagaattaggaatcgccaaatggacggagaatccgtatgaactgctggaagatctcacgattgacgccgtcatcattgtcacgccgacaagcacacatgcggaaatgatcatgaaggcggctgaaaacggcaagcacatctttgttgaaaagccgctcaccctgagtcttgaggaatcgataaaagtcatgaaaaaaatcgaagaaacggacgtcatctgccaggtcggttttatgaggcggtttgatccggcatacgccgacgcgaaaagaagaatcgacgccggggaaatcggcagacccatttattataaaggatttacaagagatcaaggcgcaccgcccgcggaatttatcaaacatagcggagggcttttcattgactgctcgattcatgattacgacatcgcgagatatctcatgaatgccgaggttacgtctgtcagcgggcacgggaggattttaaagcacccgttcatggaggagtgcggcgatgtcgatcaggcattaacatatcttgagtttgattcgggcgcggccggcgatgtggaggcaagccgaaattctccgtacggccatgacatccgcgcggaaattatcgggacggagggaagcattttagtcggcacgctgcggaaaagccatgtcaccattttaacggagtcaggcagcagctacgaaattattccggattttcaagcccgctttaaagacgcttaccgtctggagcttgagcactttgccgaatgtgtgaaaaaaggggaaacgccgattgtgacagacatcgatgccgcgattaacttaaaaatcgggatcgccgcgacggaatcttttaaaaccggaaggcctgtaaagcttaccccgggcgcccccggctatgccggattatgatagattcgaagtaaaaaagcaaaggcccggcatgcctttgcttttttataattcatatgagaaaaaaatgtagtcagtcggcacgcctttatagcccatttggtgaagcatcgcgcttatattgccgcgatggtatgtgccgtgattcacaatatgccggatcacatcggcatatgtcgtccgaagcgttcccatgcgcggatgagaaatggagatcgggccttccatgttctccgattctcttaaaaattcgctgtattctttgtccagttcagtcattctatgttcaatcgcctcaaaatctccgtcaagcttttcaaattgatcaaactgcgagacgatttgttcgtaagtttctctgtaaagcacgtgaagccaagtgtaatcagcccggcatatatgcacaagcacggcgttcaaagtcggaaaaacactatccagttcctgctgtaagcttgccgcgggcagggtcttcagatgctgaataacttgctcattggcccatctatggtagtgatacagctttaaaatgtctgacattccaattccccctcttccttccggtacattcaacatgacctggccgaattccttttatcgaaacaaaagcgccgcaaaataaaaagcagcaccccacatcaccaatgccgagcattgattcaggatgccggggagccggccgcctgtatccgcggtttcgtttaataaaaaatcacgtcacgatggcgccgagcgcttctgcgaatgtaacggcatgagacggagagatgcggcatcctttcagcttatcaagcgagacgtgcagatgatcaaatgtgcacgtgctgatatccatattaaaaagagacgtgccgatgaagtttgcgccgttcaaatcacagacgtcaagatctgtgtattcaagaacagcatcattccactcactttctgaaaggccgcacgagtcaaaacggacatgcttcatattggaatagctgaaggagctgtaatttgcgaggcagtcttcaaaccgtacatgacgcatggcggaatccgccagattcaagccgagaagttttgaatgctgaaacgccgttctatggatgatgcttccgctgaaatcagcgtttgagacatcgcatttgtcaaacaggacatccgtacattccatatgtctgaaagagacatccgtaaaaacggtgtttctgaaaatgactttttcggcgcgcaggccgtccagtttgccgtttacgatgccgttttcaatgatgacttctttgagctcctcatcctgaagcgcttcagtgaaagaaagcaccggcaattctttcgggattttcggtttttggatcgtattcatctcatactcccttttctaaacataatagctgaaatcggcaattggcagatatcgttttcgcccctgcccacccttgccgaattgcgtgttgtttactgaacaaaggttaatatcaaagcgggatcgcgtcaatagcggcgcttataaaagcttcattccgtttgaacgtcatccggcacgccgaaagataacaaaacaaagcccttataagagatgccacgggcttttgcctgtttcaggcgagttctttatacatgatcacatgcgggccgatgccgggtatgtcaaaggggctgcccgtgcttttccagccgagcttttcgtaatatcccttcacgtgacatctggcgttgcaccagacaagcgccgcccccatatctgccagttttcgttccgcataggcgattaacgtgcttcccgctttttgcgtccggtattcttcaagcgttgccatgccgcgcagctggtaggcgggcgccgcctgtaaagcctgctggttctgcgggtagaaagaagcgatgctgatcaatgtcccgtcgtaaaaacctccgagatgaaatgctcctttgacgctgtcctgatcatatttacaatcctcaatcgtctgatgggggcgcagcacgctgtgtctgatcgcgtatgtgtcttctgcggtgatgggttttacttcaaccatgaaaaaatcctcctttgcttgattctttttctgtatcgtaccatgaaaaagccgcctgtcgtatcaggcggcatcttccgcgtcaatgcaaatatacatcagcccgcttttcatccttttgcttaatataagctgcaagttctgatgtcaaatcagaacggagaaacggggtgattaaataaattccgttaaacagttcgcacgccgtgtcgagaagcgacttggcgatggcgaggccttcggctttctgcttttgcttgtcttcgccggcgagcgccattttttcccggatgctgtctgacagcttaatgcccgggatttcatgatgaataaactctgcgttgcggctgctcgttaacggcataattccgatatacaccggtgttttgagatgtttcgtttcatgatgaatgtcaatgagctgctgctccgagtagacaggctgggacacgaagtagtcagctccgcactcgatttttttctccagccgttttaccgctttatcaagatggcggacattcggattaaatgctccggctacggaaaagttcgttttcttgccgagcggtttccctgataaagaaatgccttcgttgaattgtttaatcagcctgatcaagtcaaaggacgttaaatcatagacggaggtagcccccggaaagtcgccgatttttgaaggatcgcccgtgatggctaaaatgtcggtaagcccgagcgtatccagccccattaaatgtgactgaaggccgatgatgttgcggtctctgcatgtaatgtgaacgagagaacggatatcaaggcgttctttcagcaatgaaccgcaggcggcattgctgatccgcggtgtcgccaatgaattgtcggcgagcgtcagcgcttctatgccggtttcttttaattcagccgccgcttgcagaaatttgtcaaaattcaattttttcggcggatcaagctctacgataattgaccgtttttgagcggcgatttcgtttaaacccggctcggtccgttcattccggacggagatgacttcttcttcccgtctgattttcacttctttatcagtgacgggggaaagtccgcggaccgcttcagccatggctctgatatggtttggcgtcgtaccgcagcagccgccgataatgcgcgcgccctgagtgcggaactgtacggcgctctcccggaaataggcatcgtccgtatcataaacaagccggccttcttctaaagacgggaggctgctgttcggatagaccgataaataagtgtcacggaatatcggcacttcggtgagcgcttcaatcatgtggtacgggccgagccggcaattgattcccgttatgtcagcgccgagatcggcaattgacctgagggcttcccgaagcggcgttccgtcctgcagcacgccctgttcgtgcatggatacattcagcataatcggaagttccgtttcttttctcgctatcttcagcacttcgcgcgcctcttctaaatcatagtatgtttccaggagcagaccgtccggctcttcgtgaagcaataaataaagctgctcccgaaagctgcgtttaatctcctccaggctgtaggcgtttttgttaaatgtgcggatgccgcccatcgttcccaatacataagcgccgtctgaggaagcgcgcgcgattctgaccgcctcctgattgatttttttcgtttcatcctcaagtccgtatcttgagagcttaataaaattcgcgccgtacgtatttgtctggatgatgtctgccccggcttccacgtaagccttatgtatccgcttgatttcctcgggctttgatacgttcagttcctcaaaacatctgtcaatgccgtaggaatagaggagagtgcccatcgcgccgtctccgattaaaatccgttcttttaagtcttgtaatagtcccattgtttgcctccttcgtcacattcagcaaggaaaaaagagaaataaaaaaagtcttcttaagaagaagactctgtaatcatttgtctctcttcttatcttccaagctgtttttagcttgctggatttagcaccttggtcatggtttgggttaaaccattacaccggttgctgaagcgtcgtcgggccagtccctcggcttctcttgataagaacgttcatgtaattgtcatgggtttccaaaacttaactgtgaaaatccctttctccaaatttaccgaaaatagagacaataatcaataggaatcacataatttatctaaaattaataaattgaacgtcaatcggcaggtctgccccgcggacggctgcaataatctgctgcagatcatctttattttttccggtgacgcgcacttggtcgtcctgaatctgcgactttaccttcaagccggagtttttaatcaccgcgttgatttttttggcgctgtctttatcaatgccctgtacaagcttcgcgcgctggcgcaccgtgccccctgaggcattttcgattttgccgtattcaatgttttttgtcggcacgtcccgtttgatcagcttgccgctcagcacatctttgagctgattcagtttaaactcgtcatcagaaatcaggacaagttcttccttttctaaagttacatcgcttttagatcctttaaagtcatagcgcgtgccgatttctttcagcgtcatctgaatcgcattctgcacttcgggaaattcaactttggatacaatatcaaaagaactttcttttgccatgagaaaacctcctataacatttcacttatgagttgattatagtagaataaagagaaatgtccaactgcataaagcatgaatttatgcatattggaaaaaatgagaaaaacatcagccccatacgggcgaatcaggaaggacgataacatgagaccagggcagcagctcacgcttagtatagatcaccaaaccgatttcggttattttttaaccgacggcgaggatacggttcttttacataacagtgaaattacagaggatattgaagacagagatgaagtggacgtatttatttacgtcgatcatcaggaaagactcgcggcgacgatgaaaaagccgctcatcagcttttatgactacggatgggtggaagtgacggacgctgtggaggatatgggcgtattcgtcgacgtcggtctgtcaaaagacgcgctcgtcgcaacggagcacctgcctccgtacaaatccgtctggccgcaaaaaggcgacagactgtattgcatgctgaaggtgacaagccgcggacgcatgtttgccaagccggcgcctgaggatatcatcagtgaattatttacggatgcagaggaagacgtcatgaataaagacctgacaggcacggtgtacagactgatcgcatcaggctcttttctgattaccgatgaaggcatccgcgcgtttattcacccttcagaaagaaaagaagagccgagactcggcagccgcgtgacggggcgtgtcatcgaggtgaaggaagacggctccgtcaacatgtccctgctgccgagaaagcaggatgcgctttcggttgacgcggaggagattctgacctatctgagatcaagaaacggcgcgatgccttacggagacaaaagcgatcctgacgatatccgcgaacggtttcatttaagcaaagccgcctttaagcgggcgctcgggcacctgatgaaaaacggcaaagtgtatcagaaagacggctggacatacgaaaaacaataaattttctgcaaaaacatcggtgaaccaaaaccggtgttttttattttctcaaaagctcctatgccctcatttgtttatcaacctgccgaacatacatattttattgaaataaaatattctgacatccgaaccgatatataactatagaaaaaaacaaaaggagagtttcaatgagaaaaatggcgatatttgcggctgtactgctgcttgcgctcagcacggcgggatgtgccggcaaatccgagggggcggcggctgaaaaaacgaaaacaatcggcatcatgctgacagacaacggcctcggcgaccaatcatttaatgattcaggctttcaaggtttgatgaaagcaagagacgagctcggcatcacatttgattacagagaaataaaagacaccggtacgtacgaaaaaggactgacccagcttgtccgggaaggcaatgatcttgttgtggggctcggttacagcatgcaggcggatttagaaaaggtcgccaaaaaatatccgaagcagcggtttgtgctgattgattctgtatcagacctggataatgtcacctccgtcacgtttaaagaggatgaaggaggcttcttagccggagcgctcgcggctatgacgagcaaaaccggcacgatcggatttatcggcggttcagatgccgacgtcattaaacggtttaagaaaggctacctgaaaggcgcggaatcagtcaaaccgaacatccgcgtgctgtcggaaatcagcggtacgtttgatgatgataagctcgggaagcgcatcgcccaaaacatgatccgaagaaaagccgatgtcctgtttacggcggccggcttcacgggtgtcggcgcactgaaagaagcggaggcgcgaaaagtatacgccatcggtgttgacagcgatcaatattacaccgccgagcacgccgttatctcttctttagtgaaaaacgtcgaccatgtcatctatgaattggcgaaagatttaaaagacaacaaggagatcaaaagcggtgagatcgtttacggactgaaggaaaacggcatggacttagccaagatcagagttgtcaaaaacgcaggcgggctgacgaaaaagatcacggatatgaaaaacagtctgattgaaaaaggaggcgatctgaagtgacattacggacaaggctgctcgttaacgcagccgttacgatgatttgcttcgccgccgtcatcggctttaccatcgtaaacatgatgaagattcaggcttcaaatgaagatgaagtggacgcgctgttaaacgtccaggaagcaaaagccgaccttaatacgttaaaagaaagcatcaccggctattcctatacgctcgcagacgcccagaaagaagatgtacaaagctatatgaaaagcagctcggataaactggcggcgctcaaaaaaacgatgacggacgatgcggacaaagccgctaagcatgcggcaggcatcagtatgatggcgcagaccgtttccgacattgcgggccagaccaatctgctgtccttaaacgccgcaatcgaggcggccagagcaggcgaggccggaaaaggatttgccgtcgttgccgaggagatacggaagctcgcagacggatcagccaaagcgaccgcgcagattttcgatatggtaaagcaaattgaagacggcatcacatctattaccggagctgtcacgaccggcgtcgctttagcggacagacagcaggagctgatggagaaaacgtcagaatcattcgcccatattgaacaaaaagccgcccatattaaggcggagcttactcaattggacggacggatcatcgaatcgaaacagcttggtgagcaagtgctgcatcatgccgaaagcatcagcgccgtcgttcaggaaacggctgcaggaagcgaagagatttctgcctccgcgcttgagcagctgtcttcttttcataaaatggcggaaagcgtcaataatctggtgagcctgacagagcggttaaacgatcaggtccgccggtttactttgtaacagacatccgtgcgcaaaaaacagccctctttctcctaagacaagagggctgttttgcttttacagatggtccggttttttggaattctggttttttcccgcctgccggtttttttcggcaagccggttctttttctggtttacggcgttattgtccaacggttttttgtcatcatctttcatgcggcaaagcctcccttctgtccgttaggatgcccgcccgcattgaaattatggcttcaggaaaaaaatcgcgagcgtgcccggcccggagtgggcgccgatcgcagagccgattgaatgaagaatgatttctttcggatggaacgcttcttcaatcatttccttcatcccaatcgccgtctcttcattatctgcatagctgattcccacggtttgatccgcccaatcgccgccttcttccttcatcatttctataatccgtttaaacagtttcttctgtccgcgcaatttttcgagcggcacgagcctgccgtcatccacatgcagaatcggtttgatgttcaaaagccccccgacaaaagcggacgtttttgaaattctgccgccccgtgcgagataggcgacgtcatcgaccgtaaatatatgtttcatccgtgcgcaaaagttctttacagacgtttcgatttcttgtattgtattcccgttaacacagagtgtttgcgcgtgcatcaccgcgaggccgcagcccaatgaagcgcatttggaatctacaatccgtaaatcaaaatcgggaaattcctcttttacttcattggcgatcattacggccgtctgataggtgccggaaagacctgaggaaaaggcgatgtatatcgccggttctcccagttccgcgtattgtaaaaatactttttttatcgtatccggtgatgcctgggatgttttcggaactttcccttcccgcatcgcttgaaagatatgatccgcctgaatggtgaccgcgtcctcatattcgtttccgtcaagtgttacgtgcagcggaatgaacccgatccggttttcttcaatataagatttcggcaggtcagaggcgctgtcagcaataaggtgaactgtcatcataattcccttctttccggttggtgagagtgatgccaactatatcatataaatttggcaaaatagtgttcaaaactttattttaagggaaaagctaataatgaaaatgagcggaggagcaagccatggtactagaacaagtaaaaaaattagcaatcgtcgtcatcggcgcgtttctgtatgcggcgggactgaatttattcctgataccggcaaatgtatattccagcggttttaccggtgtcgcccagctgctgtcaagcgtcgttgatcaatacgcccccttttatatttcgacaggagttctcatgttcctcttaaacattcccatcggtgtgttagggtggctgaaagtcggcagatcattcaccgtatacagcatattaagcgtagcgctgacgtccgtctttatggggattctcccggaaatgagactgtcacacgatattcttctgaataccgtattcggaggagtcatctcagctatcggcatcggtttaacgctgaaattcggcgcttcgacaggcggtcttgatatcgtgtcgatggtgctggccaaatggaaggataaaccggtcggcacatatttcttcattttgaacgggattatcattttgacggcaggattattgcaaggatgggagaaagcattatatacccttgtcgctctgtatgtcacaacaagggtgattgacgccattcacacgcgccacatgaaactgaccgccatgatcgttacaaaaaaagctgatgaaatcaaagaagcgatttacgggaaaatggtccgaggcattacgacggtgccggcaaaaggcgcttacacaaacgaacagaaagaaatgatgatcatcgtcatcacgcggtacgaattgtatgaccttgagaaaatcgtgaaagaagtcgacccgaaagccttcacaaacatcgtgcaaacgacggggatctttggtttcttcagaaaagactgataggagcggatagaatgaagtggctgtttggcctgttattaccggtcattttattgatcggatgcagcagtcaatccgggcagaaggagcccgctgaggaggtatccggagagatgaatgaacagcaagcggaattagccgtaaatcctgtgcagacagatcagcagatcgaatttcaaatgtctttaaaaaacaaaagcgaaagcccgatcgatttcacattcagctcagggcagaaattcgaactgaccgtacatgaccaacatcacaaagaactgtaccgctattcaaaagacaaaatgtttacccaggcgtttcagaccgtgaccttaatgccgaatgaaacgtatgacttttcagatgtgtggaagaacgtgcccggtccgggaacatacacggtgacggtgacgtttttagggaagtccgatcagatcggaaaaagactgaaaacggtaaaaacatttgaagtaatataaaaaagcggcgccctcatctaaacggggcgcctttttttattgcaatttctccagctgatcctgaaattggtgcagctgctgacgttctgcatccgtcgaattggcgtacgcggaagacacggcatttttggcgcgtgagacagctttttcctggtcgccgtcctcgaaaccgttagcaatcatgacggcctgctggacaaatgacttggcttgagaaaacagttcgtttctcattaaaagtcaacctgcctttcagccgaatcttttgctgcatcatgctgtgcttcctctaatgtagaccgatatggaaatcttgcgtcatgaagactgacagagtccttgccttgctgaataaaccgttttgatttgtttcgtttacccattgcaatgtcccccttccatatttagacgagatgagtcgtctgttttagtatgggcggaaggctttgtgttatgagcgggaaaacctcacagggagaaataggattttaaaaattcggcgattccgtccgcttcatttgaacccgtgacgcgatcggcggcctgtttgacttcatccgtgccgtttcccatcgctacgccgcacccggcaaatcggagcatttcaagatcgttgtcttcgtcgccgaacgcgatgatccgttctctcggcacttggtaatagtcgctgattttcttcaggccgaccgctttattcatcccgtgtttaataatttcaatcacatgccaaggagccgcccatcttctgtggtcaatgacctcggcgtgcacatcggataaatgcgcgcgtatgtccgcgacgtcctcttccttcgcgtgaatcaatacggacgtcacatcctcttggaccgtttcgcgcagatcgccgaatgtgacattcgccgtattcatatgaaacgcctcaattaaatgctcatcatgataatggaagtacacatcatcaatgatctcagcgagcacattatgtatttggtaggtctctgtaagttcggcaagctgtctgaccacatcgacagataaagacgtgtggtatcgtccccatgactcgtctttcgggtggtggacaaacgctccgttaaaattgacaatcggcgttgtcagcccaagctcgtcataatacatcgaactggaacggaaagggcggccggttgagatgcagacatgatggcccgcttctttcagcgtctgaatcgtccgtgccgtttcaggggaaatggttttatcatcttttaataaggttccatccagatctaaggcgatgaggtaaggttttgtctccataaataactccttttgtcatataatttgctgtttttctcttatgtacagtgtagctttttaccatctttattgtctacatgttacacttatgattatggttatcctaaggagggagtcaacgtgattcttattgatcatcaaaccgtatcaggcattccgtttttacatattgtaaaagaagaaaatcgggaccgtcccgctccccttgttttctttattcacggttttacaagcgcgaaggagcataatcttcatttcgcttacctgcttgctgaaaagggtttcagagccgtgctgccggaagctctttaccacggtgaacgcgctgaacagctgtcagcagaagagctcgccgtccatttttgggacattgtcttaaatgaaatcgaggagcttgacgtgctgaaaaaggattttgaagggcgcggtctgattgaagacgggcggatcggtcttgcggggacgtcaatgggcggaattacgacattcggcgcgatggctgcgtatgattgggtcaaagccggcgtcagtctgatgggaagtccgaactatacggcattttttcagcagcagattgaccacattcaaaagaaggacatcgacattgacgtcacaaaagaacaggtcgatgaactgtttgcgcggctcaaaccgttcgatctcagtctggaaccggaaaaactccgcagccgcccgctgctgttctggcacggcgttcaagacaaagtcgttccgtatgcaccgacccgcggcttttatgaaacgattaaacctcattacagcagccggcccgaccatcttcagtttctgaaagacgaacgggctgatcataaagtcccgagatacgccgttttagaaaccgtcgcctggttcgataagcatttataaagcacaaaggtgttaacaaaagccgcttttgcgttatactgaggaaaaaggagtgatggaacgtggaagaagcattaaaagaaaacatcatgggcgccttggagcaggttgttgaccctgagctcggcgtcgatatcgtcaatctcggccttgtatacgacgttgatatggatgacgacggcctgacgcacgttacgatgacactgacatcaatggggtgcccgctcgctccgatcatcgtcgacgaggtgaaaaaagcgctcgccgacattccggatgtaaaagagacggaggtccacatcgtctggaatccgccgtggacaagagacaaaatgtcacgctacgcaaaaatcgcattagggattcagtaataagaaaatgcaccccggattttaggtacatcctaaagtttggaggtgcttttcttttgtctgcatataagcgacagtgagggcttgttttggattgcaaacaaacctttatatataaaatttcatatgaggtttatcttttttgtaataggacagtctgtcttggagtgtacctgtgcggaattcaaatttatgtccatcgggatcagtaaaataaattgacttttgatcttgcttatccctaggacgcccatttaatatatttacatttagattttttaacctttgaagtattgcatcaaaatcttttgggtcaattgtaaaggccgtatgcgtataggatttatgtatttcatttcttggtatatccgcctctaagttaagtgcaagccaaagcccgttcagatcaaaatatgctgttttttgccctttaaccagaagttgtgcatgaaatactttctcataaaattctatagatttttccaaatctgaaacagaaaaaagaagatgattgatcccttttatgttcattttccccacctcatttaacatctttgttttaaacaatccctttggtaatacatctgcatatatatcgattatatactgactaaaaaatcatttttagggatttctgtgtattttttatgcctggtgttttccggatgaccgttttgaactgtactaaacatgattctgccggacgcgtctgctttgtcgctgcagaccggcgtgcggaaagaagggcaagtcactaaaaaaaacaagtttcccgccattcggggttttttgcggtatcgggttaaaaaggaaaaaaacggacggaggcatgatataatagaccggctgcatgcgagggaggaacccatgaagaaaaaattacttctcattatccttagcattcttgtttatacggcgctgttcgctgtttccgcctttcacaaagagccggagcggcaggcagggacaatgacggatgtaagccgtctcatgcccgtgaaaattaagcagacggtcaaaggaaaagagaaagaaacattggtcgaaacgattaaggaagcaaagagaaagcatttgaagatctcaatcgcaggcgcccagcactcaatgggcggccagacgtattatgaagacggcatcgttctcgacatgacgggctacaacaaaatactcggtctcgaccgaaagaaaaaaatcatcagagtgcaggcgggagcgacgtggaatgatattcagcgctatgtcaatccgtacgggctcgcggtaaaagtcatgcaatcgcaaaacatttttacgatcgggggctcactgagcgccaacgcccacggccgggatatccggtacggttcgctgattgatacggtcaaatcgtttcatcttttaaaggcggacggcaaagtcatcaccgttactccgaaagatgacctgttttcagccgtcatcggcggctacggcctgttcggcgtcatccttgacgcggatattgagctgacggatgatgagctttatgaaatgaaaacgaaacgcatgaacgctgatacatacagtcaatattttacgcagcatgttcagcgcaaccccgccgtgcgcatgcatctcgcgcggatcgcaacaggggataaaggctttttgcacgatatgtatgtgactgattacacactctcagacaaccagaaagaattaaagcggcacaatgaactgaaagaagatgagcatccggcgctgacgaaattcgcgctcggcctctcccgccggtatgactggggaagaaattggttctggtcaacccagcagtcttattttctcagtcaaaacggcgtgaaagtctccaggaacaatgtcatgcggtcagaatcgaaatttttggaatatgaaaacacggacaacaccgacgtgcttcaagaatacttcgtgcccgtcggcgaatttgcaccgtacattcatgatttacgcaagacgctgtcacatgaagatctcaatctcgtaaatattacgatccgctacgtgcaaaaaaatgaaaaagccgatctgtcatacgcaaaggaagacatgttttcactcgttcttttaatcaatgaagggttttcaaaagacagccaggcgagtgcagcgcggattgtcagaaaaatgacggatacggcgttgcgccaccgcggcagctattatctgccgtatatgctgtatcaaacgaaagagcagatgcgcgaggcatatccgaaaagcgatatgttctttcagaaaaaacacaaatatgatcccgatgacttgtttatgaattatttttatcagaggtacaaatcatgaaacacaaccatttaaaatggctgatcctgtctcagagcagtgtcttttttgccggcagcctgatctttccgttttatattttatttattaaaaacatcggttccagctacactcaattcggtctatcatacggcttgttcggcctgagcggcgcattgattcatccgctgctcggccggctgtcggcaagactggatccccgctggttcctgatggcgaattcgtgggggatggcggtgcttcttctgacgctcccgcacattaccggcgtgcaccaggtttatgtggtgcaggtgcttttgggcctgttcggcgccatgcaaaaacacggcgagaaaatcatgatcgccgattacactgacggcggggagcgggggaaaaaagtcggcagctatcatttctggacggccgtattttcagctgccgccattattctcggcgggtttctcgctgatttcttcacggtttatattattttttacgccagctccgtgctgttttttataagcgggctgatgatgctgaaaaaaacaggctgatccgatcagcctgtttttcttatgaaaccccctcgatcgagagggggtttttgtcagcgaaaaccgatggaaaatgaatgaaaaaatattaaatatacaattgaattaatttttattcatgttataatgttaaataatttcacaaaaaccaagaaggtgaacccgttgaaaataggtattataggcgcgactggttatggaggcgccgaacttgtcaggattcttaaccatcacccttatgcagaagattgtatattatattcatcgagcgacgaaggaaaagaatatgccgcttcatatccgcatttgaggaatatagcgtcacaatcacttcagccgcttcatatagaaacgattcgaaacgaaattgatgtcatgtttatagccgcgccgcccggcgtttccggagagtggtcgcccaagctggcggaggcgggcatcccggtcattgatctatccggcgatctgcggattcaaaacccggccgtgtatgaaaagtggtataagcggaaggccgcgccgaaaggaacgattcaaagcgcggtttacggtttagccgaactgcaaaaagaagagattcagactgctaagctgattgccaatccgggatgttttccgacggctgtgctgctcgggctcgccccgctggcgaagaataagcttttacaagattcttttctgattgttgatgcgaaaacaggcgtatccggtgccggccgaaaagcatccatgggcactcattattctgagctgaatgataattttaaaatttataaggttaatgagcatcagcatactccggaaattgaacagcaattagcggcttggcagcccggcacaggtccgatcacgttttccgcacatttggcgccgatgacaaggggcattatggcgacgatatatacggaggctccccctggtatgtctgctgcacaggtaagagaattgtattccgaattctacaaagattcatattttgtcagaatcaggccggaaggtgaatttccggcgacgaaagaggtatacggcagcaatttttgtgatatcagtgtcaccgtggatgaaagaacaaaccgtgccaccatcgtttctgtcatagataatctgatgaaaggcgccgcagggcaggcggttcaaaatttaaatatcatgaatggctggcaggaagaaacgggacttacgatgacgccagtctatccatagaacgaaagagggattcgaaaatatgattcagctgagtgaggaaatcacgaaagtaaaaggcggcgtatcttcgccgaaagggtttgaggcaaagggcgtgcactgcggtctgcgctattcaaaaaaagatctcggagcgattatcagcgaagcgcctgcagtcagtgcggcggtatatacgcaaagccattttcaggcagcgcccttgaaagtgacgcaagagagcttaaaaaaagaggccgtgcttcaggcggttatcgtcaacagcgcgattgccaacgcctgtacgggagaccaaggattaaaggacgcctatgaaatgcgggacggcttcgcgagccagctcggcattgagccggagcttgttgcggtttcgtcaaccggggtgatcggcgagcttttagacatgaaaaaaattcaggcgggcattgaacagctcggtcaagcgccgtcagtgtccggagcatttgaagaagccattttgacgacggatacagtgacgaaacagacgtgttatgaactggtgatcggcggaaacatcatcacgatcggcggagcggcgaaaggctccggcatgatccaccccaacatggcgacaatgctcggctttgtcacaacggacgcggccgtggaagaacagtcgctcaaaaatgcgctcagagagattacggatgtttcatttaaccaaatcaccgttgacggagaaacatcgacgaatgacatggtgcttgtgatggcgaacggctgcgcggggaatgattgcctgacggagcagcaccctgactggccggcatttaaaaaggggttaaagcttgtatgcgaagaccttgccaaagatattgccagagacggtgaaggagcgacgaaattaattgaagccagagtcgaaggcgcgaaaaataaccttgaggcgaatattatcgccaaaaaaatcgtcggctcaagccttgtgaagaccgccgtttacggcacagacgccaactgggggcgcatcatcggcgccatcgggcacagtgcggcaagcgtaacggccgaacaagtggaagttttcctcggcggtcagtgtctgtttaaacacaacgaacctcagccgttttcggaaactgatgccaaggagtacttatcaggtgatgaaattacgattgcagtccgcctgcaggaaggctccggcagcggccgggcatggggctgtgacttaacctatgattatatcaaaatcaatgcgagctatcgcacatagcaaaggggagcggcatgaagaaaaccatcgtttttaagtgcggcggcagtgtaatccgcgagttatccgccgatttttttcaaaatgtaaaagagcttatgcaatcgggctggaaccttgccgtcgtgcatggaggaggcccggacatttcaagaatgctgaaaacattgcagattgaaacggaatttgtcgatggacagcggaaaacgaccaaaccggtgctggaaacagcggaaatggtcttgtcagggacgatcaataaatttttcgtaaccgaactcgcgaaaaacgggctgaaagccgcgggaatatcaggaaaggacggcggtctccttcaagcgtcttaccttaatcaagacaaatacggagaagtcggcgaaatacaaaaaaccgatccgtcaatcatccacgcattaatgaaagaaggcatcattcccgttatcgctccgctttccatgacaagtgatttcgaaacgctgaacgtcaacgcagacgccgcggcatcggccgtcgcttcagccttacacgccgataaacttttatttgtcacggatgtcgaaggaattatggacggagagaacaggctggatactttgacgccgcaagaaattcaggccctcatcgatgacggcgtaatttcaggggggatgattccgaaggtaaactcggcattatcggcactgagtgaagatgtcgaggaagtgatgatcgtaaacggaaaaggagcgtttttcaccaatcaagtcttccaaggaacaaaaatcgttaaagaaaaggagagcgtgtcatgagcagcctatttcaaacctacagccgctggcctatcgatattaaaaaagcgaaagggacaatcgcagaggatgaaaacggaaaaacgtatctcgattttattcagggcatcgccgtttccaatctcggccattgtcatgatgcggtgacggaagcggtgaaagaacagcttggcagcgtatggcacgtttccaatctgtttgaaaatgatcttcaggaaaaagccgcggcaaagcttgccggacatagcgcgggggatctcgttttcttctgcaacagcggagccgaagcgaatgaaggcgccattaagcttgcccgtaaagcaacgggaaagacaaaaatcgtaacatttcatcaatcctttcacggacggacctatgcggggatggccgccaccggacaagacaaaatcaagaccggtttcggaccgatgctccaaggctttcactatcttccgtttaatgacccgtcggcattcagcacactttcaaaagaggatgatatcgccgccgtcatgcttgagacggtgcagggagaagggggagtcaatcccgccgatccggaattcatcgaagccttacagacattttgcaaagacaaacaggcgctgcttatcgcagacgagattcaaaccggaatcggccggacgggcaaggcattcggctatgagcacttcggcatctctccggacatcatcactgctgcgaaagggcttggaaacggttttcccgtcggagccgtgatcggcaaaaagaagcttgccgacgcctttacgccgggtacgcatggtacgactttcggcggtaataagctcgccatggcagctgtgaaagcaactttggacattgtgtttcagccggactttctccaggcggcggcagacaaaggctcttttttaaaagcgcagctgaaccgtgaactgacagggccttttgtaaaagaaatccgcggaaaagggttattaatcggcattgaatgcgcaggtcccgtgtccggcatcatcggagatctgcaggaacgcgggcttctcgtgcttccggccggaccgaatgtcatcaggctgcttccgccgcttacggtttctgaagaagaaatgctgtcggccgtcagtatgctgaaagcagcgatcgaagcgcattcggcagtgaaacggtaatttttttcgatataaaggtataaaaattcatatttttaattaattattcatcaagaggtgggctttagatgaaaggctatttagtattggaagacggaacatcattcggcggtgaacttgaaaaagaggcttgctgtgttggcgaagctgtttttttcaccggaatgacgggctatcaggaagtgcttacagacccgtcatataaggggcagatcatcgtctttacgtatccgctgatcggaaactacggaattaatgaaaaagaccttgaaagtaaaattccacaagtcaaggctgttgccgtctatgaagcgtgtgaacatttttctcaccatgaagcagtctcaagcttgagagagtatttaaataaatggaacatcccgctcttaaccgaagtggacacacgggccgtcgtcaaagccatccgctccggcggcacgatgaacgctgctgtgtcaacagcaggagaaattcccgcagcatccggaacacaaaatccggcggagctggcgcagtctgaagacatcacttcaatggggaacggagaccggcatattgcgctgattgatttcggttataaaaaatcaatcgcctcgtcacttgtaaagcgcggctgtaaagtaacggtcattccgtatcagcagatggatgccgtttatgacattcagcctgacggaatcgtgctctcaaacggcccgggcgacccgaaagcgattgcgccgtacatgaaccggattacatctttactcagtgatttccctgcactcggcatttgcctcgggcatcagctgattgccctggctttcggaggaaatacgtataagctgccgttcggccacaggggtgccaaccatcccgtcattgaccggaaaacgaaaagggtgtttatgacaagccagaaccacagctatgtcgtcgatgaagcgtcaattgacgaaaacgagctgtccatcagatttcaccatgtcaatgatacatcagtggaagggctcattcataagcgccttcccgtattaagcgtccagttccaccctgaagctcatcccggtccggctgagagcgagtggatatttgatgaatttctagagaaagtgataccagcaaggagagaaatcgctcatgcctaaagatacaaccatttccagcatattagtcatcggctccggccccatcatcatcggccaggcggctgaatttgattattcaggaacgcagggctgcatggctctgaaagaagaaggataccgcgttattctagtcaataacaacccggcaacgattatgacggatgaggcgtttgccgatgaaatatattttgaaccgctcacaaccgacagcatcgaggccattattgaaaaagaaaagcccgacggtctgcttgccaatttgggcggccagacggcattgaatttagccgttaaacttgaagaagcaggcgtgctgaagaagcatcacgtcaagctcttaggaacatcggtggaaaccattcaaaaaggcgaagaccgggagcagttccgcgccctgatgaaagagctcgaccagcccgttccggaaagcgaaatcgtcgacaacgaagaagacgccctccgcttcgctgagtctatcggatttccggttattctgagaccggcgtacacattaggcggaaagggaggcggaatcgcgaaaacgaaagaatcgtttcagacgcttattaaacaggcgctgttagcaagcccgatcagccaatgcctcgtcgaaaaaagcatcgccggatttaaagaaatcgaatatgaggtcatgcgcgacagcaatcatacatgcatcaccgtctgcaatatggaaaacatcgatcccgtcggcgtgcatacaggagactctatcgtcgtcgcaccgtcccagacgttaacggatgaagaatatcagatgctgcgttccgcaagcctggcgattatttcggcgctggatgtggtcggcggctgcaacattcaatttgcgctggatccgttcagcaaacagtactatgtcattgaagtgaacccgcgtgtcagccgttcatcggccctcgcgtcaaaagcgaccggctacccgattgccaaaatggcggcgaaacttgccgtcggctatacgctcgacgaactgaaaaatccgctgacgggctctacttatgcaagctttgaaccggcgcttgattatgtcatcgtcaaattcccgcgctggccgtttgataaatttaaacatgccgaccgcacgctcggaacgaagatgaaagcgacgggagaggtcatggcgatcgaaagaaatatggaagcggccattcaaaaagcggcggcctcccttgagctgaaaacgatcggcacccgcctgcctgaactcggcggctgtacgatcaatcagctgtgggaattagcggtaacgccggatgaccggagatttttcgtcgtcatggaactgttaagccgcggtgaaacgatagaagatatccatgccaaaacgaaaattgacccgttttttctccatgtattccgaaatatcatcacattagaaaacaagctgatggaagaaggggatcatctgtctgtcccgcttttaaagcaggcgaaggtaaaaggcttcacggatgtcatgatcgcatctctcacgggaaaaacggaagaagacatccgtgctctcagaaagaaatcaggcatcgtcccgtcgtttaaaatcgtagatacatgcgccgctgaatttgatgccaagacgaattatttctactccacctaccttggggaaagcgacggagatgtcagccgaaaagagaaaaaacgcgctctcatcatcggctcaggcccgatccgcatcggtcagggagtggaatttgattacagcgccgtccacggcgttctgaccctgcaaaagctgggatatgaaacgattatgatcaataacaatccggaaacagtaagcacggattatgaaatcgccgaccggctttattttgaaccgctgacgacagaacatattttaaacgtggcggaacatgaaaacattgattttgccatcgtccagtttgggggacagaccgcgatcaatgccgctgaaccgctggaaaaagcgggcattccgctgctcggaacatcctttgaaacccttgatgcgctggaggatcgggatctgttttatcagctgcttgatgatcttgacctcaaacatgccaaaggcgaaacggcttattcaaaagaagaagcaactgaaaaagcaagccgaatcggctaccccgtgctgatccgtccgtcttatgtcatcgggggatgggcatgatcatcgttcattcagaagcgcaaatgtcagagctcctggaaaaagaagcgggcatgccgtacccgattttgatcgatcagtacattacaggaaaagaattggagatcgatctgatttccgacggacatgaagtattcgtgccgacttacacagagcacattgaacgggccggcgtccattcgggcgacagttttgcgattcttccgggtccgtctgtcacacctgatatgcagcggaatataaaagaggccgccgaaaaaatcgcggtaaaactggcttttaaaggcattatgaacattcagtttgtcattgatgacaaaggggatattctcgttcttgaagtgaatccccgggcaagccgcacggttcctgtcgtgtctaaggtgatgggggtgccgatgatcccgcttgccgccagattgctggccggcgcttcccttaaagacatcaagcccgaggttcaaaatcagcacggaacggcagtgaaattcccggttttttcttctcacgccattcaggatgtggacgtaaagcccgggccggaaatgaagtcgaccggagaaggcatgtgtgtcgcgtttgacgcagaaagcgcactgaaaaaaatctacgcgcacgtctgggagaaaaaaggcagcatctatctggaaggctgtgatgcggaattggaacgtcaggctcaagaggcgggatttaccgtatgcaaagatgcgttcccggcatgggcagagcgaaaggataaagcggtccatattaatttcaatcactctgaagaagcgcgtaaacaacggatcgaagccatgacgcacggtgtgacggtctttactgaaccggaaaccgtaaaggcatttttagcaagcggctccggcaaacctcagcctgtatcgctcaaagatctttatcaaaaggaagtggcatcatgcacacaataaaagcggaacacacattaacccatttgtacggcaaagattttctttcattaaaagatgtcagcccgtcagacatcaatgcgcttctgacagaagcttcattattaaaacaacatccgatacagccgattttccaagggaaaacattggcgatgatttttgaaaaatcttcaacccgcacacgtgtgtcttttgaagcgggaatggcccagctcgggggaacgggactatttctttcaagcagcgacctgcagcttgggcggggggagacggtcgcggatacggccaaggtgctgtccggcttcgttgatgccattatgatccgcacctttgagcatgaaaaagtcgaagagcttgccgagcatgctgatattcccgtcataaacgggctgaccgaccggtatcacccgtgtcaggcactcgcggatctgttaacaatacaagaaataaaaggaaaattaaaaggagtaaaagtcgcctatatcggtgacggaaataatgtcgcgcattcacttatgatcggctgcgcaaaaatgggctgtgacattgcggttgcttcgccgaaaggctatgaagcagaggaagaggcggtgaatgccgcgaaagaagcagcggctgtttccggagcgaaaatcacccttaccgaaaatccgcaggaagcggtgcgggatgcagacgtgatttactccgacgtcttcacgagcatggggcaggaggaagagacgcagcagcggctgaatgtgtttgctccgtatcaagtcaacgcctcactcgtcagtctcgccaaacccgactatacatttttgcattgcctgccggcgcatcgggaagaagaggtcacgtccgagattatcgacggcacgaactctgcggtattccagcaggcggaaaaccggcttcacgcgcaaaaagcgctcctgaaagctcttctatacaaacaggatgaacaaaaaaaccgctgaatctcattcagcggtttttgatatttctccgcatacaagcgcatactacataaaaaagaaaaaggaggaaatgacgtgggacagcagcatcaattccgcccgggacaaaaagcgccgaataacggtgtgtacgttgaaatcggcgaaacgggaagcatggtcaaaaatccgcaaaaaatcaaacttacggtgggagaaatgttccctgaaacttcaaaccacaacagattgtggacgtaccaacgaaaaccgtgaacacaaaaaaacctgctgaatagcaggttttttatttaatgctggtttgcatcctgtttgacaggcatgatctccgcaagaacaaagactagcaccgcaataaccacggcaataacggatgattgcttgaaattgtacgccgcgctgttcatggaggcgaccaaataacaggccatatgtgttaaaaggaacgtccaaataaaaccgataataaaccgcacgtttccacctcgtccttcattttattctacgttgtatcataccatacataaagcgcgggcggaaggtcattttctcatcaaaaagcgcgcctgaaactgacatgtgcccgcctgtcttgccgtctgacggaaaattcggttcctgtgcttgggataatagccaaaacatagcagcaaataggagtttatccgatccgttttcattcttcttacatatgatagccaatagagagattaggagtaaaaggaggcgggcaggcatggggataacggaaagatttttccaattcggatctgagctgaacgtcatccatctgccgtatcggccgaacggcttctgtatctttattctgggggacagaactcactttgtcagccgggactcaagcttttggctcgaacatgaagggagaaaccagctgttaaatacgctgcttgacagagggtacaccattttcaacagcaatttatacggacggcattggggttcggaaaaagccgccctttacgccagacagctgattcattatgtgctgaaacaagaaaccctcaatccgaaaatacacttgctcgcagaaggcatgggcgccctcatcgccgatcaattgctgcagtcttcaccggagcatatccgttcagccgcaatgttagatccttgtctggaccttcaagcccattttgaatcagagaaagaaaataagtttttttataagcagtttctgagggaaacggcacaaagcttcggtgtttctgaaaaagaggcaagctcactgagctatcagaccattaccggctgccgcacccgcgtgccggtacatatatggcaaagaacgaccggagcgccgtacccgtacaccctgcacgcgaacgcgtataaagaagcccgggaaaagaccggaagcaagattgatatcacgtatcacctgcttgagaaccctgctcgtatgtacagagccatctgccggtttttccgcagtcatgaaaaagacctgtaatgaatagaatacaacagccatctcttttcagagggctgtttggcttgtgtgtgtatgaaaaaccggaaaggcggcagatgtgatgaaaacagcgctgatcattggagcagatgaatttctcggcctttcattgtgcgaacggttgatggatgaaggtgtgcacgttgatgtcattttggcagaaccggaggacaaaacgaggcagctgtatttagaagaacgtttaatgtggctcgcgagaaacgggctttttcaaataatagaggaaatcggtgaaaaggaatacgatcgtatctgcgttcaatacgggagcgggtgtctgcctgaaaaaagggctgagcctttatattggattgtttacagtgaggatcacggagactgggaaaaaaacggtcagcgggatacggcaaaagcgattatccttcctcccctttacggtccgtggacggaagcaaaagaagatggagaaagcaggatctttttagaagacgcggtctgggggctgatgaataagcttgaggctgacggcacagaagacgaaaatcagattattaccctggaaataaaagaaaaaacgcaaaaaacggaagcggaagaaaaaattaaagaatggaaaagacaattttcatcaatattcgacattttttaagaaataccttccatgttatgtgcattaccgctacaataaacgtatatcaattatacatgttatgagtttgaaaaggggttgaacatggcttgatcaccaggcttgtcatgatcttttctgtcctccttttattgagcggatgcacacaaactccgtttaaaggaaaaattgagaaggtcggaatgcttttccccgataccatcagtgacttggtatggggcacaaaaggttacaaaggtttattagcgatacaatctgaatttaacgttgacgtttattataaagaaaatatcagatccgatgaagatattttaaaagcgatagatgattttcataaaaaaggagtcaatcttttatacgggcacggaaatgaatacgaggaaatcttcaatatgatcagcaaggattatcccgacatggaattcgtcgtcgcaaacggaacggcgaaaagcgataatgtcacaagcgttcaccttatgggagaagcaatgggttttttcgggggaatgacggccgcccatatgtcaaaaaccaatgaggtcggtgtcatcgcctcctttttgtggcagcctgaagtagacggctttatcaaaggggcgaaatatgaaaagcctgatatcaccgtcaatactgaatttacggaccactgggataacggcaatgaagcgctgcatctttacgagaagttaaaagcggagggcacggatgttgtatatccggccggagacgggtataatgttcctgtcattcagcaaatcaaaaaagacgggctttacgccatcggctatgtcgccgagcaatcgaatctcggcaaaaacacggtgctgacaagcacggtgcaaaacgtagataaagcctatacattaattgccgagcaatataataaaggtacgctcaagagcggagatcacgactttgatttcagggaaggagtcgttgaaatggggacgttcagcccgctggtggacaaagcgtttcaagacaaaatctcagaccttgtcaaaacgtataatcaaacaaatgaactgccgtcaaatgaatagaggtggatacacatgcagcatgaaaagtctcttgaatttatgcagatcgcgatgaaatacttgccggaagcaaaggcggagcttgagaaatccggcatagatctgtctatggaaatgattcagccgtttatggacctgtttacatcggtcatggcggaagcgtatgagcttggcagatctgatgccggggagctgaataaataaagagagccactttttcatgaagtggcttttcacatgatttttttctttatggcggacaccatcggcgcaaagtctttaaatacgggctttaattgatccagggagttcatgatggaccccagctgattcaacacgtggttgtaatcgatctcttcttcgttttcagcctgaggctgctccgggttttcttccggttctttatcccggtctctggaatcgccgaacatcattttggagaaaatatccatagtgaagcctcctttcgtcttccttttattctatgaggagcagcgtccgatagtttagacgaatatattgccaacagaaaaaaaatagggtagaattagtacctgatactaataattgatcataactaattagttttaaattcattataaaaaaggagtcttttccaatgaaagctggaattcttggcgtcggccgttacatcccggaaaaagtgctgacaaatcatgatcttgaacaaatggtagatacatcggacgagtggattcgtacgagaacaggtatagaagaaagaagaatcgccgctgaagatatgtattcatccggcatggccgctgaggctgcgcaaaaagcgcttgatcaggccggcatttccgctgaggagcttgatatgatccttgtggcgacggttactcctgaccagtctttcccgaccgtttcctgtatgatacaagagaagctcggggccaaaaaagcgtgcgcgatggatatcagcgccgcatgtgcgggttttatgtacggtattgtaaccgccaaacaattcattgaatcgcaaacatacaaacatgtcctcgtggtcggcgtggaaaagctctcaagcattaccgactgggacgaccgtaatacggctgtgctgttcggagacggagccggagcggcggtcatcggaccggtcagcgacgacagaggcatactttcatttgagctcggagcagacggtacaggcggtcagcacttgtacttagatgaaaaagggcatacaatcatgcatggaagagaagtattcaaattcgccgtccggcaaatgggtgaatcgagtgtaaatgttattgaaaaagccggcctctccaaagaggacgtagactttttgattccgcatcaggcaaacatccgcatcatggaagcggcacgggaacgtttggagcttccggttgaaaagatgtctaaaacagtccataaatatggaaacacatccgcagcatccattccgatttcattagtagaggaactggaagcaggcaaaattaaagacggcgacgtcatcgtcatggtcggtttcggcggaggattgacatggggcgccatagcattacgctggggacgataaaaaaaggtgaggtgcacacaagatgagtaaaaaaagagtagtcgttacagggcttggagccttgtctccgcttggcaacgacgccgaaacaagctggaaaaatgcaatcggcggcgtatccggaatcggaccgatcacacgtgtggaatcggacgagtatccggcgaaagtagctgctgaattgaaagatttcaatattgaaaatcacatggataaaaaagaagcgcgaaaaatggaccgcttcacgcaatacgctgtcgtagccgcgaaaatggccgttcaagatgccggtctgaacatcacagacgagatcgctccgagagtcggcgtttgggtcgggtccggaatcggcggtcttgaaacgcttgaatcccaattcgaaatcttcctgacaaaagggccgagaagggtcagcccgttctttgttccgatgatgattccggatatggcgacaggccaaatctcaatcgctctcggagcaaaaggagtcaactcctgtacggtgacggcatgtgcgacgggaacgaactctatcggtgacgcgtttaaagtcattcagcgcggcgatgccgatgcgatgattacgggcggaacggaagcgccgctgacaagaatgtcatttgcgggcttcagcgcaaacaaagccctttctacaaatcctgatccgaaaacggcaagccgcccgtttgataaaaaccgtgacggctttgtcatgggagaaggcgcggggatcgtcgtgcttgaagagcttgagcatgcccttgcccgcggtgcgaaaatctacggggaaattgtcggctacggctcaacgggtgacgcctaccacattaccgcgcctgcccaagacggggaaggcggtgcgagagcgatgcaggaagcaatcaaagatgcgggcatcaagcctgaagaaattgattacatcaacgctcacggcacaagcacgtactacaatgataaatacgagacaaaagccattaagaccgttttcggtgatcatgcgtacaagcttgccgtcagttcgacaaaatcaatgacgggtcatttgttaggcgctgccggaggaattgaagcaatcttctccgtcatggcaattaaagacggcattatcccgccgacgattaacatcgaaacacctgatgaagagtgtgatttagattatgtaccggataaagcgcgcgagcaggatgtcaacatcgttctcagcaactcgctcggcttcggcggacataatgccactttgatctttaaaaaatatcaataatacagtttttgaccggctgcctgaaaaaggtggccggtttttttgtgcgtgcatatgataacaacaagaggaggcgaaccggtatgagcgtcaagcagacatatcaatggatggaaaaggcggcatccgtaaatgacctggccccgcatcttttgccgcttttttcaggggccgataagaaagagtggaagccgatactcgggatgctgcaaaaccacggcatgttccgccatctgaaggacggcgttaggaccagtaaacggctgaaagaaaaaggatgctacagccatatacaaaaagaggaagcctatttaaaggagaagtggaacgggccggacgtgccgatcgtagttttgcccgttgatgaacgaaaccggaaaatccgtcaggaattcggatcaaaatccggtctggcctttcgggacaaaatgttcctctttctatcgtcggatagttccaattcagctgtatccgcccttatgacacatgaatataatcacgtctgccggttagaacatgtgacaaaggacgaaaaagatgagacatttcttgatacaatcatgatggaggggctggcagaatatgctgtatatgagcggttcggctcaagtcttacggcggaatggacgtcctactatacgcctgagcagcttgattttttgtttgaaaaaagagtcaagccgaacctccgcttaacgagagacagcagaatgttttcccagctgttatacggaaaaggatacttcccctcaatgcttggctatgccgtcggattcaatatagtaaaaaaatatttaaccgaccatcaaaaaacagtaaaagaagcattggccatcccttcaaaaacctttctggaagcaacgctttaatagattaaaagaatggaaattatttaaggatattacatttatcctaaaaaattcttgcttttgtaataatgatgtaataatatacaactataaaatttttcgactattctatattttgtgatagcgaaacgtatgtttccctctgcttcagcggaatgagaaaggggcgtatcatgagcacactattagaagtgaataatttaaagacctattttttcagaaagaaacagccgatccctgcagtcgacggggttgattttcacattaacaaaggcgaaaccgtcgctcttgtaggagaatccggctcgggcaaaagcatcacctcgctttctattatgggacttgtccaaagctcgggcggaaaaattatggacggctcgattaagctggaaggcagggacctggcctccttcaccgaaaacgaatattgcaaaatccgcggaaatgacgtctctatgatctttcaggagcccatgacttccctgaatccggtgctgaccatcggcgaacaaattaccgaagtgcttgaataccataaaaaaatgaataaaaaagaagcggctaaaaaagccgttgagcttctggaactcgtcggattctccagagcggaacaagtgatgaaagaatatccgcaccgtctttccggagggatgagacagagggtgatgatcgccattgcgctcagctgcaatccgaagcttctgatcgctgatgagccgacgacggcgcttgatgtgacgatacaagcccaagtattggagctgatgaaagacctctgcaaaaaattcgatacttctattctgctgatcactcacgatttaggtgtggtttccgaagccgccgacagggtgatcgttatgtattgcggacaagtcgtagagagtgcgggtgtggaggacttatttttaaaccctcttcatccgtataccgaagggctgttaaactccataccggtgatagatggagagattgatacattaaaagcgatcaaaggcagtgtcccgacaccggataatcttccggaaggctgccgattcgccccgaggtgttcaaaagcgatggacaaatgcaaaacagggcagccggagctgataacgcatgaaagcggccgttctgtaagatgttttttatatgaggaagagggtgcccaatcaaaatgacagctgcaggccaagaaacgattttagagctgaaagacgtaaaaaaatatttcccgatccgctccggtttttttcaaaggaaagtcggtgatataaaggctgttgacggcgtttctttttcactgaagcgcggggagacgctcggcatcgtcggtgaatcaggatgcggcaaatcaacggcgggaaggacgatgatccgtttatacaagccgacagacggccggattctctttaaggggcaagatatctccggcttatctgaagaaaagctgagaaaaagcgtccgcaaaaacatccagatggtattccaagatcccttcgcatcccttaacccgaggaaaacgctgcgttccattattaaagagccgttccagactcaccatatgtacagcatgagcgagcggaacgagcgagtggaggagctgctggcgaaagtcggccttcacccgagctttgcaaaccgctatccgcacgaattttccggggggcagcgccagcggatcgggattgcgcgggctctgacgttgaatcccgagctgattattgcggatgaacccgtttccgcactcgatgtctccattcaggcccaagtcatcaatctgatggaagaactgcaggatgaattcaacctgacctatttgtttatttctcatgatttgagtgttgtccgccatatcagcgacagagtcggcgtcatgtatctgggaaaaatgatggagctgaccgataaacacgagctgtacggcaatccgcttcacccttatacgcaagcgcttttgtcttcagtgcccgtcacgagaaaaaaagacgccgtcaagcgggaacgaatcatcctgaaaggagaactgccaagcccggcaaacccgccgaaaggctgcgtgttccacacgcggtgcccgatggccaaaccgatctgcaaggaacaaatcccggcatttgaagaagccgctcccggccattacgtcgcctgccatttatatgcctgaaatgacaagcatcgagagggggtatgccggattacataaccagtttgctgcatatatatcacaaagggggaattgatatgaaattacgtaaaagcgcactgatgatgctaagtgtttttatggcgctcgccatcttcctgtcagcctgctccggctcaaaatccacaagcaccgaatccaaaccggcaggaaaaccgcaaaaaggcggagatttggttgtcgggtcaaccggggaacccacactttttaatccactttattctaccgatgttgcaagttctgatattgaaggcatgatttacagcacattattggaaacggatgagaaattaaacgtcaagccgtcgctggctgaaaaagtaacagaagctgacgggggattaacgtatgatgtaaaactgaaaaaaggcgttaaattccatgatggaaaagagctgacggccgatgatgttgttttcacctacagcatccctcttaacaaggattacaacggtgagcgtggctcgggttttgagtcccttaaatccgtaacgaaaaaaggaaaatatgaaattcagtttaaaatgaagaaaaaagatgcctatttctataatgtcgttctcgacagttacggcattttgccaaaacatatattgggtaaggtgccggttgcagatctgggagagaatgaatttaaccgtaaaaatccaatcggctccggtccgtttaagtttgttgagtggaaaaaaggtgagtatgtcaaactggaagcaaatgatgattactttggcggcagaccttaccttgatacagtgacagtcaaaacaattcctgattctaacgcggccgtggcccagttaaaagcgggagatattgatttcttcgttgtgccgggcacagattttgatacggttaaaacgtttggaaacgtgaaggtcaaatctgatctcggcttaaactacagctatatcggctggaatgagaaaaaagagctttttaaggacaaaaaagtgcgtcaggcattgacttacgctcttgacaggcaggcaatggtggatcaagtgctgaacggagacggtaaggtagcggatgttcctgagagtccgctgtcatggaattatccgaagtctaaagtgccgacatttgattataatccgaaaaaagcaaagcagctgctaaaagaagccggatgggaagaccatgacggtgacggctaccttgataaagacggaaaaaaattctcatttgaaattaaaacgaatcaaggcaataaaattcgtgaagatttagctgttgtcgttcagcagcaattaaaagaagtgggaatcgaggctaaaccgcgaattgttgaattcagtgcgttaatcgaacagacaagtgcccctaattgggattatgacgctcttcttctcggatggagtcttgcaacgttcccggatcaattctctatcttccattcaagccaatcgaaaaacgggctgaataatatctggtataaaaacccgaaagtcgataagctgcttgaagaagcgaagtcaattacagacagaaaagaataccaaaagaagtatgaagagatatacaaattaattgctgaagatcagccgtacagcttcttattctattacaattaccacagagcgatgccgaataatttacaaggctatgtattccaccctaaaaatgacttgtacaatattgaaaaatggtggctggatcaaaaatagcaaaagccctggagagggaaggaggttcctttcctctcttatcctatttaaaaaggggacaagaatatggttacatatattttacggcgaacattaatgtccttgccgattctcttaggcattacaattttgtcgtttgccatcatgaaagcagcgccgggagacccgatgtcacttatgatggaccctacaatcagtcaagcggacagggcgaaattcattgaaaaatacgggttgaatgatccggaacctgttcaatatgtgaaatggctggggaatatgctgcaaggggattttgggacttctatcgtcaagaaaggcactccggtttctgaacttatcttatcccgcttaccgaatacgattgtgcttatgcttttctcaacccttgtcgctcttctgatttctattccatttggtgttctgtcagcgaaacgtccttattcaaaattggattacgggataactgttacttcatttttagggcttgccattccgaatttttggttcggtttgattttaatcatggttttatctgtaaatctggggtggtttcccactggcggagtaagcactttgaatgctgactttaacatatttgaccgattgcatcacttgattctgcctgcttttgtgctcgccacggcagacatggcagggataacgagatacacaagatccagtatgcttgatgtgttaaaacaggattatatacgaacggcgcgtgcgaaaggattccgagataataaagtgatttttaaacacggtttgagaaacgggcttcttcctgtcatcactatttttggtttgatgataccgtcatttatcgggggagcggtagtggtagaacagatttttacttggccgggtctcggcaaattgtttattgattcagccttttcgcgggattatccggttatcatggccatgacggtcatttcagctgttttggttgtagtggggaatttaattgcggacatcttatatgcgctggttgatccccgcattgaatattaacaaagagaggtgagaggtcaaatgttacagccaaataccggcacaccccccagcgaagtgaaattaaaggaaaatattcaatccaaaccggaaacaatgacgaagatttttttcgaaaagttctttcaaaataaactagctgtaatcggagccgttatattaaccatcattatcttgtcagctttattcgcttcggtaatcgctccttactctccggagagtcaatctctcatcaatcgtttgaagccgccgagcttaaaacatctaatgggaactgataaattcggaagagacatctttacgagggttctgtacggggcgcgcgtctccttgcttgtcggattcgcttctgtgatcggcgcgattacaatcgggacagttgtcggagccgttgccggatattttaaagggtttgtcgatgccgttctcatgagaaccgttgatatcgtattatccatacctgatatatttttgttaattacacttgttacgatttttcagcccggaatggataaattaattttaattttctcccttacaggctggacaacaacggcacgccttgtccgaggagagtttttatcgcttcgttccagagagtttgtattagctgcaaagacgatcggtacaaaaaaccatcacatcatcttttctcatatactgccgaatgcgctcggaccgattatcgtctcagccacattaaaggtgggaacggttattttggcggaatctacattaagttatctcggtttcgggattcagccgccgatcgcaagctggggcaatatgcttcaggatgcacagaactttacgcttatgatacaggcttggtggtacccgttattcccgggtttgttgatccttcttaccgtattgtgcttcaactttgtcggagacgggctgcgtgatgcgcttgatccgaaaaatgtgaaatgatctcccggacgaacgggagatttttttgttgcaatgcagtcggaaatccagctccgtaaaacggaaatctcatattgaaatggaataatttatctatcccttgcctatactgtggacaacagtttttataaagtgaggggtcgaatatgttatttcttcatgatgtatgggtcaattggtttgaaggggaagaaaacggctacaatgtatgccattttcacgaatggcggaaggaagacacggttgagcttttggatcagacgccgctgctcagagtgccgtcagtattatttcattacatagaaaacgacttatcagagcttccgaaagagctgcttgaccaagtccaccagaagtcatacgtgcgaaaaaatcatgagcggacaaagctggagtactgttttgtcgtgacagacgggatcggcatcattgccgtggatacgatcgggtataccattccggtcagaaagagccgcctgattccgagacaggagcagcttgtttatgaaatggtaaaggatgtagaaccggaatcgtttcaatttgagccgtcgcaattggagtcttcaaaggaatatcacattttgtcattggcgccggggcatgtcagaggtctgacgagaaaagagcggcagatcaagcagctgatgtttatggcgctcgaccagctgaaagggctgaaaaaccgtgcggaaattgtgtattggtacacggaatggaatccgcatatgtatgagcagatcaaacggatgagttttgaagagatctgggacatgctttacaatgaaacaattgaaggctggtcggataaacatcttgcgttctgtgaaaatttgattaaagggcagccgtttttcgaaaagctttgggaaatggaacaggaatcaaaagtgaactaaaaaaagaggcggggattctcccgcctcttttttttatcttcttttccgtccgagacccatggcgttttccattttcttcaccattttgccggccgttttgtttgcgcgcgccgccccttcgtcgagaatgcggtcaagctcgtcgctctcaattaattcacgatagcgctcttggatcggtgtcaatgcgccgataacgacttcggctaaatcgcttttgaattcaccgtaccctttgccttcatatttagcttctaattcttcaattgatgtgtttcctaaaatagaataaatcgtcaaaagattagaaacgcccggtttgttttctttatcatactttacaatgccttcagaatcagtcacggcactcttgattttcttctcgagctgcttcggctcatcaagcagcgtgatgaatgccttttggttcggatctgatttgctcatttttttgagcggatcagccagtgacatgatgcgcgcgcctgattcaggaattttcacctcaggaatcgtgaagatgtcattgtattttttattaaagcgttccgccaggttgcgggtcagttcaagatgctgtttttggtcttctccgaccggaacaagatccgttccgtacagtaaaatatcgccggccatcagcggcggataggttaacagtccggacacgacggcttctttgccctttgacttatccttaaattgagtcatccgctcaagctcgccgatatatgcgacgcattggagcatccaccccgcctgggcatgagcgggaacttccgactggataaagagggtcgctttctcgggatcaagtccgacggccagataaagagccgcgagattgcggatgttcttccgcagctcaagccgatcctgcggaactgtaatcgcatgctgatcgacaatacagaagtagccgttgtagtcatgctgcaaatcaacaaattgcttcattgcgccgatgtagttgccgagggtaacggaaccgctcggctgaatgcctgaaaaaatcgttttcttcatagttcttacctcatttcttaaaacataataaaaaaagcccattcttcccgtagaaaaaagggacgaatgaaccgtggtgccaccctgattattccattacaatggaatcgctcgagacgttggtaacggaggctgctccggctgggcctactaacgttcggtcagctgctcagaagtccattccacatcgcccgttacctgctcccagcaccgcagactctcttcaaacggatgaaaatgtgtactactcttcatcatcgcaatcacaacaaatgtatttgattgatctattataaatcaattatagccaaatgtcatcagaggaatacaagcttatttccagtttactttaggggtggaaatcctcaaaaagaactgaaaaagcttaaatgataacgtatatcaacatttcgtataacgaatattatatgtaaaaagcaatatgaactggaaattacattaaaaaaatttagttaggtcatgctttaaactatagaagtgtatcacctttttgacagaaaaactgaccaaatttaaatattttaaattgagaaaatagtattgcaataaattattcatttcattataatgaacttgttcactctattgttacagcttctttacataaaataatcagaaaagacggaacacaattaaagtttagaaaaatattaagttattttgtctgatatttctgagtatttagtagtaaaggctgaaaaatttgattagggggttagtgcatgaaaaagcgttggtctattgtaggtttgatgcttatcttctcgcttgtattaagtgcgtgcggcggattcagcggcggatcaggcggcggcaaaaaagacaccaaaggacagacttcacttaatatcaatattaaaaccgagccgttctcattgcatccgggtttagcgaatgattccgtttcaggaggcgtaatccgacagacttttgaaggattgacacgcgtaaactccaaaggtgaccctgaagaaggaatggcatctaaaattgaaacaagcaaagacggaaagacctatacatttacgattcgtgacggtgcgaaatggtctaacggcgaccctgtgacggcgcaggattttgaatatgcatggaaatgggtgcttgacccgaacaacgaatcacaatacgcttatcagctctactacatcaaaggcgctgaagctgccaatacaggaaaaggcaagattgatgatgtaggcgtaaaagccgtaaatgacaaaacattaaaggttgaactgaataacccgacaccttatttcacgcaattaacttcattctatacgtatatgccgatcaacaagaaaatcgccgaaaaacataaaaactggaacacaaacgcgggcgaaaattatgtgtcaaacggcccgttcaaaatgacggcctggaaacacagcggttccatcacgctcgaaaagaacgatcaatattgggataaagacgctgtgaaattgaagaaaatcaacatggtgatgattaacaataacaacaccgaactgaaaaaattccaggccggtgagcttgactgggcaggaatgccgctcggccagcttccgactgaatctctgccgacattgaaaaaagacggatctcttcacgttgaaccgatcgcaggcgtgtattggtacaaattcaacacagaagcgaaaccgctgaacaatgttaacatccgtaaagcccttgcttatgcgatcgaccgctcgtccatcgtgaaaaatgtaacgcagggcgaacaaatcccggccatggctgcggtgccgccgtcaatgaagggattcaaggataacacaaaaggttacttcaaagacaatgacgtcaaatcagctaaagaattcttaaataaaggactgaaggaattaggcgtcaagagtgcctctgaccttccggcgatcaagctgtcctacaatacggatgacgcgcatgcgaaaatcgcgcaggccgtacaggaaatgtggaaaaagaacttgggcgtcaaagttgaacttgataactccgaatggaatgtttacatcgacaagctgcacagccaaaactaccaaatcggacgtatgggctggctcggcgatttcaacgatccgatcaacttccttgaattgttccgtgataaagaaggcggaaacaatgataccgggtgggaagatcctgagtttaaaaagctgctgaaccaatctcagcttgaaacggatccggataaacgtatcgaagagctgaaaaaagcagaaaagatctttatcgacgcaatgccggtcgcgccagtttatttctatacggatccttgggtgcaggataaaaacctcaaaaatgtgatcttgacaggaacaggcgaagtttacttcagaaacgcttcttttgaataaaagccggttctgaaaacaaaagacccaaggtatatggggaggatgtccccatatacctttcttactgattacgtataaaattgtaaaaaacatggaggtgttcaccttgctgaaatatatcggtaaacgattcatttacatgatcatcacattgtttgtgattgtgaccgccacgttcttcttaatgcaggcagcgccgggcggaccattttccggcgaaagaaagctgccgcctgaaattgaggcaaacttaaacgaacactatggtttggacaagcctcttttcgttcaatatgtcagctacttaaaatctgtggcgatgtgggacttcgggccttcttttaaatataaaggccaaagtgttaatgatttaatcaattcaggcttccccgtctcattcactctcggtgcagaagctattctcctcgctttagcgttcggtgtgcttttcggggtgcttgctgccctgtaccataataaatggcaggattataccattgcgattttaacgatctttgggatctcagttccgagctttatattggcgacgattttgcaatatattttctcaattaaattagaactgttcccggtcgcaggatgggaatcctgggcatacacctttctgccctccattgcgctcgcttccatgccgatggcgttcattgccagactctcccgttcaagcatgattgaagtgttaaacagcgattacatacggactgcaaaagctaaaggactgtcccgtccgtcagtcaccgtgcgccatgcgctgcgaaacgcgcttttgccggtcgtgacatatatggggccgatggcggcatccattttaacgggaagtttcatcattgaatccattttcggaattcccggtttaggcgcgcattttgtaaacagcattacaaaccgtgattatacggtcattatgggagttaccgtgttcttcagcgtgctcctgcttctatgcgtattaattgtagacgtgctgtacggattaatcgatccgagaatcaagctttccaaagcaaagaaaggagcctagaccatgcagaacattcctaaaaatatgtttgaaccagcttcagctaatgccggcgatgccgaaaaaataaataaaaaaagcctttccctctggaaagacgccatgctccgcttccgcagcaataagcttgcgatggtcgggttcgtactgatcgttcttattattctgatggcgatttttgcgcctatcttttcaaggtatgattatgccactaccaatctattaaatgcggataaagcgccgtcgaaagatcattggttcggcacggatgaccttggaagggatatattcgtccggacatgggtgggcgcgcggatttccatctttatcggtgtcgcagctgccgtgcttgatttattgatcggcgtaatctggggcagcatttccggattccgcggcggacgcacagatgaagtgatgatgcgcatcgccgacattctgtgggctgttccttcattattaatggttattttgctgatggttgtcctgccgaaaggattgctcaccattatcgtcgccatgacgatcacgggctggatcaatatggcgaggatcgtccgcggacaggtgctgcaattaaagaatcaggagtatgtgcttgcttcacagacactcggtgccaaaaccggccggcttttgtttaagcatatcgtcccgaacgcgatgggctctatactcgtaacgatgacactgacggttccgacggcgatttttacagaagcgtttttaagttatttgggcctcggcgtacctgcgccgcttgcgagctggggaacgatggcctcagacggattgcctgcattaacctattacccttggcgtctgttcttccctgccggctttatctgcctggcgatgttcggctttaacgttgtcggcgacgggttaagagacgcgctggatcctaagttacgcaaataaggagtgatatgagtgacacgtttgctagaagtaaaagacttagccatttcatttaaaacatacggcggagaggtacaggcaatccgcggcgtcaatttccatttgaataaaggagagacgctggcgatcgtgggggagtcgggttccggaaaaagtgtgacctcccaagcgattatgaagctgattccgatgccgccgggctactttaaaagaggacagattctttttgacggacgcgatatcgtgccgatgtccgaaaaagaaatgcaggccatcagaggaaaggacatcggaatgattttccaagatccgatgacctctctgaacccgacgatgagagtcggcaagcaaattacggaagtgcttttcaaacatgaaaaaatctcaagtgaagcggcgaaaaagcgcgccatagagctgcttgatctcgtcggaattccgatgcccgaaaaacggatcggccaattcccccatgaattttcaggcggtatgagacagcgtgtcgtcatcgcgatggcgcttgcggcaaatccgaaactgttaattgccgatgaaccgacaacagcgcttgatgtgacgattcaggcacagatccttgagctgatgaaagatctgcaaaagaaaattgatacgtctatcatttttatcacgcatgatctcggcgttgtcgccaatgtcgccgaccgggtcgccgtcatgtacgcgggtcaggtcgtcgaatcgggcacggtggatgaaatcttttatgatccgcgccatccgtatacgtgggggctgcttgcctcaatgccgagtctggacagcaccgatcaggaaaaactgacggccatcccgggtacgccgcctgatctgacgaatcctccgaaaggggatgcatttgcgctccgcagctcatatgcgatgaaaattgactttgaacaggaaccgccgatgtataaagtgtctgatacgcattttgtgaaatcgtggcttctgcatcctgatgcgcctaaggtcgagccgcctgaagcggtgaaggctaaaatccgtcagcttccgaatacgtatcagcatcctgttttaatgaaggaaggtgaaaaaaatgactgagaaacttctcgaaatcaaacacttaaaacagcattttttcacgcagaaaggaacggtaaaagccgtagatgatttgtcatttgatatttataaaggcgaaacgctcggccttgtcggagaatcgggctgcggtaaatcaacgacgggccgcagtattatccggctgtatgaggcaaccggcggggaagttctctttaacggggaaaatgtccacgggaaaaaatcccgcaagaagctgctggagtttaaccggaaaatgcagatgattttccaggatccgtacgcatctttaaatccgagaatgacagtcgccgacattattgccgagggaatagatattcaccgcctggcaaaaacgaaaaaagagcggatgcagcgggttcacgaactgctggaaacggtcggtttaaataaagagcacgccaaccgctacccgcatgaattttcaggcggacagcgccagcgtatcggaatcgccagagcgctggcggttgatccggagtttatcatcgcggacgaaccgatttcggcgcttgatgtctccattcaggcgcaagtcgtcaatttaatgaaagaattgcagaaagaaaaagggcttacttacctgtttatcgcccatgatttatcaatggtcaaatacatcagcgaccgcatcggcgtcatgtatttcggaaaattggtggagcttgcgccggcggatgagctttacgaaaacccgcttcacccatatacgaaatcattgctgtccgctatcccgcttcctgatccggactatgaaagaaatcgcacgcgaaagaaatacgatccggcagttcatcagctccaagaaggagaaaaaatggaattcagagaagtgaaaccgggacattttgtcatgtgcacagaagctgaatttaaaacctatctataaacgtatcatcctccaagactgagtcttggaggatttttttgcgcacattcaagtttattaagcctgctcccgtttttctataatggaaaaaaagggggagatcagtatgaaaaccattttgtgcgccatttgtgcgggactgtttatcagtgcagccgcttatccggcccatgccgctgtgaaagaggagcagccgcttgtaaaagtagcactggctgaaaaagaattgccgaaatcaaatgcacggttcgcttatccgtcagggctgcatttttcacatcctgataaggtgcggggcatttacgtcacaggacattcagcgggaggaagcaaattcggggagctgacagactttgtggacaaaacggagctcaatacaatggtgattgatgtcaaggacgacaacgggaacctcacctttaagccggacggccattctgagtatgccaaaatcgccaagccgtacatcaaagacccaaaaaagatgatgaaaaagctggaggaaaaaaagatctatccgatcgcgcgtattgtcgtatttaaagacagcgaactcgcgaataaaaagcccgagtggtcctttaaagaaaaaaacggaagtgtctggaaaaacggccgcggcgaatcgttcgtcaatccgtttatgaaagaagtatgggattacaatgtaaagattgcaaaacaagccgtaaagatgggttttcaagaaattcagtttgattatgtccgttttcctgaagggtttgaaaaacgtgatgacgaactgacatacggacacggcgattacggaaaaacagcagacagcaatgtgcaaaaacgcgttcacgccgtcaccgattttgtcggttatgcgaagaaaaaactcaagccgtacggcgcggatgtgtcggttgatattttcggctattcagccacgctgccggaagcgcctggtatcggccagaatttcagcaaaatttcagaccaggtcgatgtcatttcatccatgatttatccgagccattggacaagctatttcggcattgataaaccggatcttgagccctacaatgtcgtcaaagaatacgcgaaggtggaaaataaaaagctgtccaagctgaaacacccgcctgtatcgcgtccgtggcttcaggacttcacggcatcatatctcggcagcggaaattatcaaaagtacgggaaacgccaggtggaggaccaggttaaagcgctgcatgatgaaggaattgacgaatttttattgtgggacgcggcaaaccgttataccaaaaacgtcgattacacaccattttaaaaaaattgaaaccatgttaaaggatcacacgtcttaatagatgtaagattgtttaaacaatcggaaatggggtatatctaaaagtgtgaagacaacgaacccataaggagcaaatgaatgaactggtacgaaaagctgagtgaatattttccgattgaagaaatgaaatcaaaagcgcatatggaagctctgttaaaggagcaaagcgatgtttatcataaagaagaggggcagtaccacgtgctgatgtatgcggaatttgactctttcatctttattgattacctgtttgtgtcaaagaaatccagaggacaaggcctcggaagcaagctgatcggcagactgaaaaagaagaacaagccgattctgcttgaggtggagcctgttgacgaggatgacacggatacacagaaacgcttgcgtttttatcaaagagagcatttcaagcacgcgcagtcaatcgggtatcggcgccggtcattggctacgaatgaagtgaacaaaatggagattctgtactggtcacctaagacggaatcagaagaagaaatatttgaagcgatgaaacagacatatgaaaacattcacacttataaagatgaaaaatggtacggagaatcatacgagaaaacggatgaagttctcaaagtcattgatgagaaaaaacaaaaaaacattttcgatcagctgagctaattgagaatggggaaaaatcctccagccgtaaatttgccggattgacacatttttttctcaggagactgttcacacttacttttttatagtataatacctataaagattccttttttaaagtcatttcaatttgagaatacaaacatgttcatcctactaattagaggagtgaagattaatggttacattatacacatcacctagctgtacgtcatgcagaaaagcaagagcttggcttgaagagcacgagattccgtttgtagaaagaaacattttctccgagccgttatcaattgatgagatcaagcagattctgcgtatgactgaagacggtacggatgaaattatctctacccgttctaaagtattccagaaactgaacgtaaatgttgaatctatgccgcttcaagacttatatactttgatcaatgagcatccgggactgctccgccgtccgatcatcattgatgaaaaacgtctgcaagtcggctataacgaagatgaaatcagacgattcctgccaagaaaagtgcgttctttccaattaagagaagcacagcgtcttgccaactgatataagcttacgataagcatggaaaaagcccaaaaccatcgcggtttgggctttttgttatttttcagtctgctggtaaatcatactggcgaggataacaaaaacaacggtcaaaatcggcagcatcatctgtatcatgccgtgttctgccatgaaaaatgacagcttgctgtctccggcaatcatttcaccgccggtaaatgcgagaagaccgctcccggcatacatcaataaaggcattttttccatggcggcatgaacgagcttgctgccccaaataataatcggcaccgagatgaagagaccgatcactactagtgtcagctcaccgtgagaagcgccggctactgcgatgacattgtcaagcgacataaagatatcagccagaacgattgtgcggatggctttccaaagagaagaactgcttttcacatgctgcgcatctttcttctcaatcagaagctgatagccgagatacaataaaaataccccgcctgcgcattgtaaaaaaggaacattcaataaatagaccgcagcgctcgtcagaacgattctcaagacgactgcgataaatgttccgaagatgatcgcttgctgtctttgtttatgggccagattccggctggccatcgcgatgacgacggcattgtcaccgccgagaataaggtcaatcccgataataagcagaagggacagcaggtaatcgtgcggcatggtaacacctcgcttatagatcgattgcttgtacagctaatatatgaagcagtgcgctatttatgatgggaaccgggagaaagcctgtttttcggtgtgaaaatgcttttttatttcttttataactgttttatcataaaatagaaatataaagaatttgcgctgtcttctataaggttaagatgtggacggaatgggtaaagtgtagtaaagtactattcatcgggagcttagatgtcccttcaacatcttataaagaagggaaggttggcaaaatggaaatagaaagaattaatgagcatactgtaaaattttatatgtcttatggtgatattgaagatcgcggttttgacagagaagaaatctggtacaatcgcgagcgcagtgaagaactgttctgggaagtcatggatgaagtgcatgatgaagaggaattcgctgtcgagggtcctctttggattcaggttcaggcattggacaaaggactggaaataatcgtaacaaaagcccagctttccaaggacggacaaaaactcgaactgccgatcccggaagataaaaaacaagagccggcagatgaaaatctcgatgctttacttgatgatttccagaaagaagagcaggccgagagccgggaagataaggagcaaaagcttcagttcactttgcggttcgatgattttgaggatctcatctcgctatcaaaattgaatcttaacggaatcaaaacgaccctgtattcgtttgaagaccgatattatttatatgcagatttttatgagcaaactgatgaagaggttgaaaatcagctaagcatcctgttggagtacgcgcacgaatcatcagtcagcattcaccgtcttgaagaatacggcaaattagtgatcgctgatcatgcgttatatacaataaaaaaacactttgcatcataaaaaaccgatttctctcagcagaaatcggttttttttgttctgaatgacaggatgaacggctgaaaaccgtataacggctctcatccgcaaacaggattatgccttcttcctgctgaatacaacaagattcaggaaaggagaagatgcaacatgttcagtgcagtgactgccggcggacggctcattcagctggccggaagctattcaaaggaaaaagcggcggagctgagaaagaaacgctggttctgccccgtttgcaaaagtgagcttgatatcaaactgggacgcgaaaaactgccgcacttcgctcataaaaaaagcaggctgtgtcccggggaatccgaacctgaaagcgaataccatctggaaggaaaaagacagctttttctctggctgaagacacaagggtgcagtgtcagcctggaaccgtatctgacttccgctggacagcggcctgacttgacggcagaaagcggagaagaaaggctggcttttgaatttcaatgtgcgaacctttcggcggactctttaaagagccggacggcaggcctgaaaaacgccgggtaccggccggtctggatcattggggcaaaacggttaaaacggatgaccgcgcaatttttccggctttctgcttttcactggcagttctttgaagtcaattcattttcctccttaatgttttactgccccgacgcccgctccttttacaggctgcattccatcactccgttttacaccggctattcttatgccggcttaaccgcaatccctcttcacaaagcaaatctgaaagacatttgtcatccggaagggcggcgcagcgtcagactttcctcgtgggggcgtgccgttaccggcttccgcaacaaaggcgggcggtttttatctgaagatgccggtcttatccggcgtcttttttacgaaagacatcaggttgcatttccatttctcccctctgaagtgtttattcccgtttcagcaggctttgtgtttgcaagtcccgtttttgtgtggcagggccatttatacttgcggcttgcggaactttctaaaaaaggcgcgccgatccgattatccggcatggttcatgatttacggcaaaaaatcaggcataaggagatccggatgcggtatggttcacaagacagccttatcggaatggcggtaaaacaatatgctgatttcttatgcttgcaggattttttaagggaaattgagaatgaagtatatatgccctcatctcaacagaagcgccctcaaacggcagaagagctgcgccggcgggacctgctcttttttggggaatgagaatgcttcatttcgttcaccctaacgtcaaggtggtggcgaatgtgaggggcgtacaagcattttgttttcgttttttcactgtattattggtatgctcggtcttatatgccgcatatgatttgacaaaaggcagtgaaaagccggaagataatcacaacacaagtttttggagaaacaatcgttttttcaattggcttgaagtaaagaaaacgagggggatcaccatgactgaggaaaataaagcagcacagctgcctgagagaagtgaagtaaaggcagagcatacatggagactagaggatatttttcctagtgatgaggcctggaataaagaatttcaagcagttaaagaattaattccgaatttatcttcatttaaaggcacgcttgctcattcggctgataatttatacgcggcgcttacggcacaggatgaagtgacgaaccgccttgggaaactttatgcatacgcacatatgcgctcagaccaggatacgggaaattctttctaccaagggctgaacgacaaagccgcaagcctgtattctcaggctgccagcgcgactgcttacattgaaccggaaattctggcgattcaggaggacaagctgcaccagtttattcttgaaaaagaggagcttaagctttactcccatgcaattgaagaaattacaaaacagcgtccgcacgtgctgagcgaacaagaagaggccctgcttgcggaagcctctgaagcgctgtcttcgccttccaatacattcagtgttttaaataacgccgatattacgtttccgtcgattaaagatgaaaacggcaaggaaactcaaatcacacacggcaactttattaatttcctggaaagcagcaatcgtgaagtccgcaaaaacgcatttgaagccgtatataaaacatacggacagtataaaaacacgatggcgactacactcagcggcactgtaaaaaaagataatttttacgcccgtgtgaaaaagtataaatcagcacgggaagcggctttatccaataacagcattcctgaagaggtttacgataaccttatcaaaacgatcaataaacatcttccgttattacaccgttacattgacctgcggaaaaaggtgctcggccttgatgaagtccatatttatgacctgtacacaccgcttgtaaaagattcgggaatgaaggtaacatatgaggaagcgaaagattatatgctcaaaggacttgctccgctgggcgaggaatacgcgtctattttaaaagaaggacttgaaaaccgctgggtcgatgtatacgaaaacaaaggaaaacgcagcggtgcttattcgtccggtacatacggcacgaatccgtacatcttgatgaactggcatgataatgtcaataatctgtttacgctcgttcacgagttcggccattccgtgcacagctactatacgagaaaatatcagccgtatccgtacggtaactacagcatttttgtcgctgaagtcgcttcaacgactaatgaagcgctgctcggtgaatatatgctgaacagcttaaaggatgaaaaacagcgtctgtacctgctcaaccacatgcttgaaggattcagaggcacagtgttcagacagacgatgttcgctgaatttgagcatctgattcatacgaaagcgcaggaaggcgagccgctaacgcctgaactgctgaacgaactttattatgatctgaataaaaagtatttcggtgacaacatggtgattgataaagaaatcagtctggaatggtcaagaattccgcatttctattacaattattatgtgtatcaatatgcgacaggctacagtgcggcccaagcgctgagcagccagatcttaaaagaaggcaagcctgcggtggagcgctataccgaattcttaaaagcgggaagctcggaatatccgatcgacatactgaaaaaagcgggagtcgatatgacatcgcctgaaccgatcgaggcggcctgcaaaatgtttgaagagaaactgaacgaaatggaagagcttctttcgaaagtgaacccttcgtaattcaaaaaagcctgtgcattaaatgcgcaggctttttctaaaaccccttaaacgtttttcggtgattcagccggtacagggcaaacaatatggacagaaacagcagtggagatgtaatgtaaatcggcagcatgtgcatcatggccagcaggtttaaaaagaagaaaaacacaatcattccgatgatcaatacggtgcggagcattgatttccctccttgtttatgattgatatattctatgaaaacaagcagtcagttatgttttgtgacaaaaatatgaacattaatcttatggcttgtcaaaactcgacaagatttgatatgataaggatgtgaaattgatcacaaacaaacattacccctttgtttgaccgtgaaaaatttctcccatcccctttgttgtcgttaagacatatgaaaccgcgcttatcccggcgcggtttctttatttgcacaaaaaaagccggctccgtaaggaatcagctttttttaatggtcacaacaggtgacatcctcctgggttccggccagagatttccaaaacagaccgtgctttgcttccactctggcgacctttttggcgaatgccagttttttcatttctttttcaacttcttctagactcaaatcataaacgagtgcgatttctttcgatgcgacaaaccggaaatattcaatgaaacattccaaaggcggcgtttcagaaggcttcggttcatccccgagcatttcgaataagatctcttcgtatacgtcataagaatagttgccgggaaccttcagcccttcatcatcatgcaggctgttaaagaacgtcaatgtcgggttgacggtgacgtccatttccgccgcgattttcatatcgcactgaagcgcttttaccgcgctttgcgaatggaggtcgcgcttgaattcttcaacatccaatttcgtcttttcagcaatttctaaaagaacgtcttcatccgtaatattctgcttggagacaaacaggctttcctgcatgctgcggagaaacagaatgcccgcttttcttccctgcagttcggccgcttttaaagcgagtgcggcaaggtagggcgatgcaagaggctgatcctgctcaagccaaaggcttccgtcacagggcatcccggaacggttcgcaattttttcccaagcttcggcaagaaggtgttttttccgcttttgcttattcagcgatgtaatgctcgcggaaacaatgatccgcagggtgaaaaaacgtccgtatttgatttttaatttttttatggcgggctccagcgaccagcattcaggacataaagggtcgacaaacatgtaaatttcgagcggtttttttggatgtccgtggcaatgggcgaagtattgctcatgctgataattcgtcaatatgatcgatcctccgcttctgactggtttaccatatgcctggccgtcagttccagacgcccgtacagaaattcacgaatatcgccctccagcccgacctgatccatcgctttgctcatacagcttagccacgcatcagccctctcatccgtaatcggaaaggggagatgccttgccctgagcatgggatgtccgtgctcttcagtataaagaggaggtccgcccaaatactgggttaaaaattgcttttgttttctggccgtttcagtcaaatcacttggaaatatcggcttcagcaagggatgagacgagacacgctcataaaaagtatcaacaagttgcgatagaagttcctctccaatcgcttcatatggtgcgttaaacgattgtcccatgttgactactcctttatatggctaataggaatcataattcccattgcgaatttatctttcagttttactatcttcagttactgtatattttagcaataacattttatttctacaaacaaagtgcctttctgtcaggcgcttgtatttcatatcatatcacatcgccttcattcatgtgtaagatttcactccgcaaaaaaaccagagggcgaaggaagcctctctggtttacgcgtaatactgccgggttatgtttttgacatattgctgtgtttccttaaacggcgggatgcctccgtaccgatctacgttgccggggcctgcgttgtaggcggctaacgcgagagatacatttccgtcgtatttcgtgagcatctgctttaagtactttgtgccgccctcagcgttctggacgggatcaagcgggtttgacaccccgagtgattctgccgtggaaggcatgagctgcatcagccccattgcccccgcaccgctgaccgctttcggattaaagcctgattcctgtttaataaccgcgcggatcagtttttcgtccactccgtatttttcggctgctttctgaatggcgctgtctattgaaaagtttccggtgctgatgtcagaagccgcattcggagactttatgctcggggaaacggtctgtgaagctgccgcggaaccggatgaaaccggaattctcggtgaatatgaagcgtgagcggtccgcacaccgtttaaaatccctgattccggctgctgccggacggctgtgtccgtatactggctgagcagcgcgctgaaattggcaagcgggctttctgaagattgtccgcctgaatccgtgcttgtatgagagattgattgcagcgccattgactgcagctggagaagggccgcccaattcgttatattcactgtgtcattccacctttttttgtttctgttcataaaaacgctggattttatttttcgtgatccgctctgggatgccgaattgcttgagcaattgttcaaacgcctgttttccttcatcccagtcagcagcctcgaattccaattcaaagtcttctttctctaaatatcggctgtgatctaaaatgattaagcctttttctgattctttttccgcgcgtgcggtcgacagcgttccgaagcagcaaatgtgttctgaacggattccgagaccgtccagctgccgtttgacggggccatccggaatcttgaagacgtcaagatccggtgccgccgcaagctgttggtgcgtttccagcagaccgaccgcggcaggttcttttaaagtcagaacgaacgagccgtctttttctcggatgcggagtgctgattttttttgtttcagggaaaaatctttcgtgtcgaaataatgattgacctgctgtttaaaatcatattctttcatgcagagtgcttcactcagcttcagaaattctgattttgtcagcaggtttttgaattcaatttctatttcttgggtcatgacagtcttcctttcaggacgaaaaattgtataattcccattatctctttagaggttacgtttatcaatatcgaccttgatatgataaaataaatgctgtactttgttaaaaaaggagaacattatgcaaaagagaattgaaatccagaatgcatcattaacagaagacgcgctccgcttgaagtgcggagaagacttaagcggagcggaacgcaaagcctcaggtcaaatgcttgttgattccgatcactttgcttttgtatacatacttgaatcagctgactcttttgaatatgtcattataaaagaacatgtctggccggatctgaaagaagccttagaccaaggaaaaccggcggtccttgaggccggcgcgaaaacggttgaactttcagggctgcatgaagaactcgattatcttcttgaaaatattaaagataatgcaaactacggagatatggaagaaaaagtgaaaaacgtatttctttagaacaggttcggaattgggggatgtacgatggatgacaaacaatgggagcaatttctagcgccataccgccaggctgttgaagaattaaaggtgaagctgaaaggcgtcagaaccctttatgagtatgaagatgaccactcaccgattgagtttgtgacaggccgcgtgaagccggtggcgagcatacttgaaaaagcgagacgaaaaagcataccgcttcatcagattgaaacgatgcaggatatcgcggggctgcgtattatgtgccaatttgtcgatgatatccagatcgtcaaaaatatgctgtttgccagaaaagattttaccgttgtcgataagcgggattacatagcagagcataaggaaagcggatatcggtcttaccaccttgtcgttttatatcctttacaaacaacgtccggtgaaaagcacgttcttgtggagatacagattcggacgcttgccatgaacttttgggcaaccattgagcattcactgaattacaaatacagcgggaacattcccgaaaaagtaaagctgaggctgcagcgggcctcagaagccgcatcccggctcgatgaagaaatgtcagaaatccgcggagaaatccaggaagcccaagccgcgttctcgcgaaagaaaaaagcgggagaccgccagtaggaaggaaaggaggggaatggcatgaaatttgccgtttcttcaaaaggagacgaggtttcagatacactgaaaagcaaaatacaggcgtatttactcgattttgatatgaccttggatgaaaaagagccggaaatcgttatttccgtcggcggtgacggaacgcttctttacgcatttcacaggtacagcgaccgtcttgataaaacggcttttgtcggagttcacacggggcatttgggtttttatgccgattgggttccgcaggagatagaaaagctcgttctggccattgccaaaacgccgtatcataccgtggagtatccccttcttgaggtgattgtcacttatcatgatgaagagcgtgaggagcggtatctggctttgaacgaatgtacgatcaaaagcatagaaggcagtctcgtcgctgacgtggaaattaaaggccagctgtttgaaacgttcaggggagacggtttatgtctgtccacgccttccggaagcacggcttataataaggcgttaggcggtgcaatcatccacccttccatcagggcgattcagcttgccgaaatggcatctatcaacaacagagtgttcaggactgtcggctcgccgcttttgcttcccgatcatcataactgtgtcatcaaaccgagaaacgacgtcgactttcaagtcacaattgatcatttaaccttgctgcataaggatgtcaagtccattctatgccgtgtggcaaatgaaaaagtcagatttgcaagattccgcccttttccgttttggaaaagggtgcaggattcctttatcggaaaaggcgaatagaaagaggaaacggattggacaacttttttatccaaaagaacatgactgcccgggatgccggcatgacggttaaagaatatacggcgcagctcggcatttcaaagcggcttctcgctgacattaaattcggcgggggagacctgcttgtgaacggagagcatgtaaccgtccgcaccgtgttagcggagggagacgtgcttaagattgaatttccgaaggagcatgtgagtgaaacgcttttgcctgagccggttccgcttgatattctttatgaagatgaccatgtgcttgtggtcaataaacagccgtatgtctcctcaattccatcaagagaacacccgtcaaaaagcatcgctaacggagtgatcagccactaccgaaaaagcggcgtgcaatcaacggttcatcttgtcacccgccttgacagggacacatcgggggcgatgctcatcgccaaacatcggctttcccattctcttttgtcggcagcacagaaaaaggggcttgtcagcaggcgatatctcgctgtcgtacacgggatcatgctgcagaaggaaggaacggtggacgcgcccatcggaagaaaacacgacagtattattgagcggatggtaacgccggatggacaacgagcggtgacgcattttcaaacggaaaaagcgggacatgcgtttacgcttgcagccctgcggctggaaacggggcggacgcatcaaatccgggtgcacatgagctacctcggccatccgttagtcggtgatacattgtacggcggaaaaaatgagggaattgcccggcaggctcttcacagtgagcggctttcattcgtacaccccatgaccggagaaacgctcgtttttcacgctccggtgcctgacgatatgaaaacattaattgaacacatgtaaagcccgaaccgtttgccggtttcgggctttatttcatgcctgcctgccgtgatcctcgcgaaatcgtgaagcatcatacggcatagagctttccacagagacggtttcatgctcgggaaaacgaaagcctgtcagctgattgccgaagacacagcctgtatcaatgttgaccgtacggttgacgatccgggggcgttttaccggggtatggccgtacacaacccacgccttgccttcatagtcggcagcccagtctcttctgacgggtctgccgtcgggatgcgtttcacccgtaatatcgccgtacagaacaaattcttttaccttacgcgagtatttaccgatatcgtcagcttttatgccggcgtgggcgacaacgagatcgccattatgtaaaatgtcataaagcggcgctgactcatataatcggataaattgtccggagacttccgttctgtcggcgggagacagctctttcagttcggctgccgtcgtttccagtccgtgcatcacttttacagggtttccttttaagtaacgatacagtttgttgcaatgatttcccgggacataacggacggctcctttttcatatgcttttgccacaaaacgcatcacttctacggattttgggcctctgtccgttaaatcccctgcaaagacaagcgtcctgccttcagaatggacgggcgttccgtctttcacttcatatccgagcttttgcattaaggcgatcatttcgtcataacatccgtgtatatcgctgatgatgtcataagccattcgtgtcagcctccttattaacggttttttatttattatggggctaattcctatacctaattacgctgttttggtacaaattaaaaaaagaattgaagaaataaagccttatcacttttttttcgcgttaagccttgttagaatatgcgttatgtttttaaaaaaagtaaggtttcgtccgcttaaagcgggcttttataacccttgttttaaggaggtatttacaaatggaacacacatcagtcgcatctttagtcgtcgttctgatcgtcgcttttttgacgccgctccttttacatcggtttaagctcagcatccccgtcgtcgtcgcggagatcatcatggggcttattatcggaaaaagcggcctgaatcttgtcgttcagggagacacgtggctggagacgctgtctgttctcggctttatctttttaatgtttttaagcggcttggaaattgatttttcttcatttgagaaagggaagaaaaaacaattccttccgaacggcaaggaagcgcccaacacgttttctgccgcgctgattatctttttcggcatctttattttatcattgctgctgtcctatgcctttgtattagccggttttattcaaaacgcatttttaatgacgcttattatttcaacaatatcactcggtgtggtggtcccgactttaaaggaagaacggatcatgaactccaatatcggccagatcatcctgcttgtcgccgttatcgcagacttggctacaatgattctgctcgctttcttctcttctctttacggagaagacagcggaaatatgtggcttctgttgattctctttgccgcgggggtcgtgctgtatttcttcggcaggatctttaaacaccgttcatttgtgcagtcgatgtctaaaggcactgtgcagatcggcacgagagccattttcacactgattatcgtgcttgtcgctttatcggaatctctcggggcggaaaatattctcggcgcgtttttggcaggcgttctggtatcgcttctgtctccgaataaagaaatggtggaacagctggattccttcggctacgggtttttaattccgatctttttcgtcatggtcggggtgaaattggatatttggacgcttttccaagatccgaaaacattaacgatgattccgctgcttctgcttgcgctgtttatcagcaaaatgttcccggtgttttatttaaagaaatggtacgacaaaagaaccgtgtttgcttcgggctttttgctgacgtccacgctgtcgcttgttatcgcggcggctacgatcggagaaaggctccacattatcagcgccaatatgtccggcgcgctgactttagttgcggttattgccagcatcatcacgccgatcggctttaagaaattattcaaacggcaaagcgcgccgcaggaaaaaaagcgcattacatttatcggcgccaaccaaatgacgctcccggttacgctggaattgcctgaggaggaatatgaagtacgggtcgtccatgtgtatcaggaaaatgccggggaaacgcttgcggaatccgttttttcggttgacacgatttctgattacgagcccggcacgcttgagtcgcacggtattttcaaaacggatattcttgtcgtggcgacgggaaatgaagatgtgaacgctgaaatcgccttactagcgaaagagaaagggactgagcgtatcatcgcaagcgtcggctcggttgagcatgaaacaaaactgaaagaagagggcatcagtattttttctatccttctgtctacaaaaacgctgctgcgcgcgttaattgaggcgccgggcgtgatgagcctcctgacgaatgaggagtcttcgttatatcagatcaatctggaaaacccggcgtataacggcatcattctgcgggaatttccgctgatgggcgatgtgattttcgtccggattttcagaggtgtggacagcatcgttccgcacggagacacacggctgaaaacaggagaccgtctcatcgtcacaggctcgcgcaactacgtgtcagaactgagaaaaatccttgaagcttgaccaaattgcaattcgtgataatatagaaggcataacaaataaatcattaatcgtatgaccactaggggtgtccttcataagggctgagataaaagtgagacttttagaccctcataacttgaacaggttcagacctgcgtagggaagtggagcggtatttttttggggttccttttatccatttaaattccaaaccacttttccgatgcgggaaagtggtttttttattttatcagggggaagacatgatgacattttctgaagaatgcagacaggcggctgccgaatggtgggacggaagttttgttcatccgtttgtaacgggaatcggtgacggaagcctgccgatagaccgtttcagctattacgtgctgcaagattcctactatttgacgcattttgcaaaagttcaggcgttcggcgccgcatatgccgaagacttgtttacgacgggcaggatggcgggccacgctcaagggacatatgaagcggaaatggcgctgcaccgcgagtttacggagcttttaggaattacggaagaagagcgtgcagcatttaaaccggcaccgaccgcctattcttatacgtctcatatgtacaggtcggtgatgagcggcaattttggagaaatattagctgcgcttctgccttgttattggctttattatgaagtcggcgaacacctaaaagagtgcaaaccggagcatccgatttatgaaaaatggatcggtacatacggcggagactggttcagacagcaggtcgaagaacagatcagccgttttgacgagattgctgaaaacagcacagaggaaatccgcgcgaaaatgaaagagaattttgtgatttcaagctattatgaatatcaattttggggaatggcttatcaaaaagaaggctggtccgagaaggacggaaaagaggtggaatcctttggagctgcacgcggtaactgataatcgcaaacccgttgccgagctggccgaggatattctatcgattcagcgcgaagtaagctttatccatatccgtgagcgggataaaacagcgggagagatcatgcagcttttgtcccttttgaaaaagggcggtgcggataaggacaaattgatcatcaatgacagggcggatatcgcgctttttgccaacatacaccgtgttcagcttccgtcccgcagcttttccgtaaagcaggtgcgaagcagatttccccatcttcatatcggacgttcggttcattcgctggaagaagccatccaagctgaaaaggaagatgcggattatgtggtgttcggccatatatttgaaaccgaatgtaaacaaggacttgaagcaagaggcatcagcctgctttcagagatcaaacgcacgctttccatccccgttatcgcaatcggcggaatgacactgcagacgatcggacacacaaagcaggcgaagccggacggaattgccgtcatgtcaggcattttctcagctgaaaatcccgaggaggcggcaaaacggtatgcacgtgcggtaagggaggccgattatgaagcagcactatgatacggcggtgatcggcggcggaattatcgggtgtgccatttcttatgagctggcgaagacgcagcagaacgttgtcttgtttgaagccggagaagtcggccgaaaaacgacaagcgctgccgcgggaatgctgggtgctcatgcggaatgtgaaaaccgggatgcgttttttaattttgccatgcacagtcaaaggctgtatgaagcggcggggcaagagcttgaggaagctagcggcattgacatcaggcgccataacggcggaatgcttaaactggcgtataccgaagaagatatcgcccgtttacggaagatggatgatctgccttccgtcacttggctttcagcggaagatgcccttgaaaaagagccttacgcttcaaaagacattctcggcgcaagtcttataaaagacgatgtccatgtcgaaccgtactatgtttgcaaagcgtatgcaaaaggagcgcggcgctatggcgctgacatatatgagcacacacaagtcacttccgtaaaacgggtgaacggagaatattgcatcacaacgtccggcggggatgtttatgctgacaaagtcgcagttgcaagcggtgtatggagcggccggtttttcagccggctcggcttgggacagcctttttttcctgtgaaaggagaatgcctttccgtgtggaatgacgataccccgctgaccaaaaccctttaccatgatcattgttatgtcgtcccgagaaaaagcggccggcttgtcatcggcgccacgatgaaacagggcgactggagcgatacgcctgacatcggaggaattgaggccgtcattgcaaaagcgaaaaccatgcttcccgccatcgaacatatgaaaatagaccggttttgggcggggctcaggccgggaacaagagacggcaagccgtttatcgggcaacaccctgaagacagcggcatcatcttcgccgccggccattttcggaacggcatcctgttggcgccggcaacggctgaaatggtgcgggatatgatcatggaaagacagattaaacaggaatgggaagaagcgtttcgaatcgatcgcaaggaggctgttcatatatgatccttcagctgaacggaaaacaaattgattggaatcgaaaagaggggacggttcaggatttgcttgaatcgtaccagcttgaccaaagaatcgtagttgtggagagaaataaagaaatcattgaaaaaaagaattatgaaaatacaagtttgtgtgaccgcgatgtcatagaaattgtccattttgtaggaggcggatgaggatgttaacaataggcggaaaacagtttcggtcaagattgctgttaggaacgggaaaatatccgagttttgagattcagaaagaggcggtggccgtctcggaatcagatattttaacctttgcggtgcggcggatgaacatctttgaagagtctcagcctaactttctcgaacagcttgatttgtctaaatacacgcttctgccgaatacggccggcgccgcaacggctgaagaggcggtccgaatcgcaaggcttgccaaagcttcagggctttgtgacatgataaaagtagaagtcatcggatgcagccggtcacttttgcctgatccggttgaaacgctgaaagcatcagaacagctgctcgaagagggatttatcgtgcttccgtatacgtcggatgatgtcgtgctcgcaagacgtcttgaggagctcggggtgcatgccattatgccgggcgcttcgccgatcggttccggtcagggaattttaaatccgctgaatctttcttttatcattgaacaggcgaaggtgccggtcattgtcgatgccggcgtcggatcttcaaaagacgccgcctacgcgatggagctcggggctgacggcgtgctgttaaataccgctgtgtcaggcgcagatgatccggtcaaaatggccagggcgatgaagcttgccgtagaagcgggccgtctttcttatgaagccgggagaattccggtgaaagattacggaactgcaagcagtccgcgagacggtcttccggtatgacggacagatattccagacaggagctgtttcagccgatcggtcccaccggccaagagaagctccggtcgtctcatgccgtgattatcggcgcgggtgcgcttgggacggcaagtgcggagatgcttgtcagagcaggggtcgggaaggtaacgatcgctgacagagattatgtggagtggagtaatctccagcgccagcagctttataccgaagacgatgtcagacaggaaatgccgaaagccgcggcggctgaaaaacggcttcggtctataaatagcgatgtagaggtcgagggatttgtcatggatgtcactgcggaaaacgcacccggattgattcgtgatgcctccctcatcgtggatgccgccgacaactttgaaacgaggctgattgtgaatgatgcggctgtgcagaaaggaattccctttctgtacggcgcctgtgtcggcagctacgggctctcttttaccgtcattcccggtgtcacgccgtgccttcactgtctgcttgagacattgcctttaggcggtatgacatgcgatacggcgggaatcatcagcccggctgtattgcagacggccgtttttcaggcagcagatgcgctgaagctgttaacgggcggatctatcgagcatgttctccgttcctttgatttatggaaaaatgaacggtcagaaataaacgtcgcccgtcttaagtcggctgattgcccaagctgcggcacaaacgattttccgtttttatcctatgaaaatcagacaaaagcggcggttctgtgcgggcggaacacggtgcagatcagaacggggatttccgaacagtttgatctgcaaaatcttgcgggacagctcagacgggcagggcttgatgtttcagccaacccgtatttaatttcattttgcacagacaatttcaagatggtactgtttcgtgacggcagagcattaatacacggcacaagtgatatcagcagagcgaaatctttttatcataaatggatcggataatgtgaaaggagcgaaaaacatcatgagcatatgcaaagcattgacgattgccggatcagattcaggaggcggcgccggtatacaggcggatctcaaaacctttcaggagctcggcgttttcgggatgtcagcccttacagcggtaaccgcccagaacacgttgggcgttcacggcatttatccgctcacccgggaggcgctgggcagccagattgacgcggtggcggaagatttgcggcctgatgctgtaaaaacaggaatgctgtggagcgcggaaatgattgcggaaattgcggaaaaaacggatcagtacgggcttgatcatctcatcaccgatcccgtcatgattgccaaaggaggcgcttccctgctgcgtgaggaatctcaggccgcgttaaaagagctgttaattccgcgcagctatgcggtgacgccgaatgttccggaagctgaggtattgacggggatggaaatccgcacgtttgaggaccggaaaaaagcggccgaacgcctttgcaagcttggggcaaagcatgtcatcataaaaggcggacatcagcctgaacaggggagaatcgttgatttattatttgacggttcgtcttttacccaaatcagccacgcttatattgacacgaaacacacccacggaacaggctgcacgttcgcagccgcgctgacggcagaaacggcaaaggggaaaaacattcagaccgcgtttgagacagctgtcaattttgtgcgggaagccgtggaacatacactcggcatcggagcgggacacggcccgaccaatcattttgcctttaaaaggaacagtctgcagacgagataaaaaagagaccgcttcaacatccgcggtctttttcccatgctttcaatctggacaaggttatgatatgataaaaattaagatcaggtactaaaactatgtctttaagacgattacaggaggctttatacatatgaatttctcacttgaaggccgcaacatcgttgtgatgggcgttgccaataaacgcagtatcgcatggggaatcgcccgttcgctgcatgaagccggagcgcgcctcattttcacttacgcgggagagcgcttggaaaaatcagttcatgaccttgcggctacattagaaagaaatgattccatcatccttccgtgtgatgtgacaaatgacgctgagatcgaaacttgctttgcaagcattaaagagcaggtcggcgtgattcacggcatcgcgcactgcatcgcgttcgcaaacaaagaagagcttgtcggcgaatatttaaatacgaaccgcgaaggattcctgcttgcgcataacatcagttcttactctctgacagcggtcgcaaaagcggcgcgtccgattatgactgaaggcggaagcatcgttacactcacttacctcggcggagagcgcgtcgtttcaaactataacgtaatgggtgtggcaaaagcgtctcttgatgcgagcgtgagatatttagccgctgacttaggaaaagaaaacatccgcgtcaacagcatttcagcagggccgatccgtacgctgtctgcaaaaggaatcagtgatttcaactctatcctgaaagaaattgaagagcgcgcgccgctgcgccgcacgacaacacctgaagaagtgggcgacacggctgcattcttgttcagtgacctgtcaagaggcatcacgggcgaaaatcttcacgtggattcaggattccatattaccgcacgttaaataacaagcagtccctttcagggattgcttttttctttcttctgattttaatcattccgtcatataaataaaacatgacagaatcggagggatgaagatgtcaaaacaaaacagaaacgcggaaaaaaaaccgctcatgtatattgttcaggcggattattcagacacgcaatcatcaatgcaggacatattaatcaaaaaaaggaaagcgccgcagccgccggaagaagagccgatgcatggaaagcgggaggaagaatgtaaaactcagcctgaaggagcagtggctgtcgaaccagaaaagcaagtacctgaacagcacagccgctcagaagaagccgttcaagaagttccggcgcaagcggagcaggacactgccaagcctgaagccgctaaaaaagagcctgaagccgctgaaaaagagcctgaagcggttcacaatgccgccccagaggaaaaggtcccgccaaagcgcgtgaaaaagccgatgagcagaatgtccattcttgaaaaaattgatttcttaacgaagctgccgcataatatgccgcggaccctttgtctgatagaagccaacgggaaaacctacagaggcgtaatcgtcggaagaaaaaataatgcgatcttcctgcggacgacaagcaacggagcgccggcagaactcgcaatagacgatattacctcgctgcatccgcttggattttaaccatacaaaaagctgcctgaattctttaatccggcagcttatttttatgctttttgatttaagaatgtgtgcggttgatcagtctcgggttcaggcaattgatggcgcagaagctatggagatcgacttcaacgcaatagttcgttttttctaaacggaatacatcgcagagagagtctttatctgtaaaatcaagaatgtgcttatgctcgtcaaaagcaataagcaggcttaatgtggcacagccgtcacagaccctttcaactctgaaaaaaacggtgttaaaacacggaccgttatccagctcgccgacatttccgaatgcggtaaacggtgatgatttagaagtgaaaagtacaaacggcactgtatcgcctaatgaaaaacccggcgataaaaggttggaatagcatccggccgggcaatcttcctcgaccgcattttgcaggtcttcaatattttctaccgcttcacgcacacagtatgttgtatgcttgctcataatatccctcctgacttcacgttttatataccggattaaacgatatcggagagtcagccgcccggaagtccgggcgggctgatgattgcatctgtaatagaaggttggaaggggattcttctttaggaaagatgcgaatcaatgactatccgtgatgctttttctctttgtgcggctcaggccggtcaacaagctccggtgaaaggcattgaatggcgctgaagcagctcagatcaacttcaatgcaaaaatctgttttttctaaaccgaagaaatccgggtcacaaggatggcagacgctgagggtgtcgccgtgcacatctacggggcgcaatactgaaagcgttgcgcagcaatcacaaactctttctgcccggaagaaaatagactcgaagcactggctgtcatccgcaaatcctccgacgttcccgaatgtggagaacaaaccgccttttttatcaaacaagagaaacgggatggtatctttaccggtaaccgtcgggcttaacagattggtatagcatccagtcgggcattgttcttcaacagcctcttgttctgctaaaatcttctcgactgcatcgcatacacaactttcatctcggccatggtgttttccgcagctcatggatttcagctccttcttttagggtatttgacttttgtctttaacaacatatgtacgcgagcctcacttggtgtgggtgaacgtctatatattcatcatatgcggagaaaataagaaaaagcagagcatttttagctctgctttttctttttagaggacaagggtgatgactaagacggcaatcagtaaatttgtcgctgttgagatcaacactgcgatatcggcatctactgttgtcacgtttacgccgcgggagttttcgatgagcaatttttgacggttgatttgtttgttagctgttagctgcaataagtcttgtgcgaccaattcagcgatgactccgtcagcaattgaagtgagagtggccgttacgactgctgcattaatcgctgtcatgactgaagcgactgcttgaacgtctgttgacgttacgttaatatcacaagagtctctgataataatcgcttcttcagaaacttgtttgttgatattcgcctgagccaggtcttggtcaaggaaggcattatcttcgccaaatccatgtccgttacagcaaacactgcatcttcttccttctttttcttctttttcttctcgcggatgttcgcattcaggatcaagtgcaacccaagagtatggtctgctttccatatctattcctccttttcttttactattattaaatgagccggccccttattttgactcaggcatctatcctgataaaaatcactattttttagttattgaccgggattttggcgtctttgccggagctgttcgattaattgttctctgcgggtttgcggatttgtctgctgttcttgcgctttttcctgctcttttttctgtttctggctttcaagaaaagcttctgttttcgcctgcatgtctttgactaatgcgatcagcatttctttttcttcatcagggatttcccgcattttatcctttgtcacgccgtgttttttgaagacattgctgacaagcacctttaaaagcggatccacttctggtagattttcgagttctttttttaatttttcgttatctgccatttgttctcacctctatttaaatatttgaaaagaaaggttaaaggatgtctagttcagcaaaaagtatatttaataattgaaacaaaatttgtacaaaggccatgatatcgtctgctgtcagtgtgattttaatattgcggctgttcaggacttgaatgacggtcctcttttttatttggcaatcatccaggatcagcagttcggttgcgatttggtcggctgtgtcttcatctgcgatcgcgagctgtgtcgcgaggataatcgccgtagtaactgaggcttgtatagaaagagcggccgttatatgtgttgtatctattgtgacattttcgcaatcaatcacttcgatcgtctgctcgaattcgttggataattgttcgtatatttgcggttgcagtgtttcgactttttcttcaaacgacataaccttcactcctttctcattcatactctatataatgcaaatgaaacgccgagcggaataagaaaaacaactaaaccgcacctatttttttaccggacaaggtgcgattcatgaagatcagggttttcgcatatgtataaagaggtcaagttttgaaaaggagtgaacaggtggttatcaattggctttcatttattctgttatcgtttgccgttttccggctggccaggcttttcgtatttgacaccattatggcgccgcttcggagcctttttcacgaggaaaaaacagaaaccgcacccgacggcacgacagaaacctacattgtcataaaaggaaaaggcatcagggcatttatcggtgaacttctcagctgctattggtgtacgggcgtatggtgcgccgcctttttaattgcggcgcagattgtgatccccgaggctgcgcaatggctgattttgctgttagccatagccggcgcggccgggatcattgaagctgcggtttctcgtcttctgcaggaataaggcggttccaccagcaacttaccgtcactttcggcataaactggcatatatgacataaggaaaggaaggatcaccatgaatcaatcaagcaaaccttcccaacactctccatacaaatcaactgtgcatcagccttacgaaaaaaaaattaagaaaaaaggctgcggctgcggccaaaagaaaaaaccgaaatagccgttttcaaaaaaaaccggagcttccggtttttttgttttttgccgaacgccggcctctgcccggcatagatcataggaggaggggatgttatgaatatatttgaatcattcataaacggtaaataccgccggcacaatcaaaatcagcgggagcatgacaactatatcttatctattgaaaaacagctgtctgagtttgatgaagcgggagcgcgctttgaggaatggatagatgtgtttgccgccgaaacagaagcgaaactgaagaaaaatgagcattctcaataaaatgaaaagaaatccgcaccggccctatgcatttatccaagccaaacaagtcggctcacatagagtatagagagtaaaggaggtgcttaaatatgggattcggatatggcggattcggcggcggctacggcggttacggctgcggcggcggctgcggatacggaggcggctatgtcggaggcggatacggctcaacatttgttcttgttgtcgtattgttcatccttctgatcattgtcggtgcatccttttttggctaaaccttagcaagactttggataagcgcgggaccgttcagtcccgtgcttccctaatgtatgaaggatagagaaggagatgcggaattttttccttgtcttacgggcacacgttccgccctttattcatacaatatcgtattactccacaaaaggaggcacaccatggataatcaattttttaaaaatattgagaagaaaacaggcgtcagcatgaaggatgtcatgaaccttgcaggatcattgcaaaatgccaatttcaaagatgaaaacacggtgagaggcgtcattcagaaggtgtcccagctggctaacaagcgtgttccgaaagaattggaagacaaaatcgttcaatcgattacaagcggtaaagagaaacttgattttggcaccatttctaaaatgttaaacaataaataggcgtcagccggccttgctaaaaaggcctttttatgtgagaagaacccggcagtgatctgccgggttctttatatcctgagtgcgctccgtctgtccgtccgaagaaggggctcgagaaatcttgagctgcgcgctgtttttccccgcctgtacgcgggacaagatacatataaatgctgcatggcccttgtcatggcgacatacaggagccgtctttcttcttcgagcggagcgggatcgccctgtctcgctgtctcaagcgcgaagtcatggggtatcgagccgtcagccgcgcctaaaatatagactgtattgaattcaagacctttagagcggtgaatggtcagcagttcgacgccgttttcatcggttttctgattctcagcggcgcgcatatgatcgacatgcgcaagaaaatcgggaatggttttgaattttttggcggccactttgacatccctgagatcatcagagcctttttccagtttgtttccctcattgccccgtttttttaaatactcggaaaaacccattttgctttctgcaaaggtgatggcttcaacgggcttcattgtccggatgcttgcgaaaaacggaacgatctgcttgatctttcctatttgaaaaggcttcaggtcaggcagtttcgtcagtgccttaatcatcgtgcaatcttccgtgattgacagcgcctttaacgtttgcagggcggattgctttaaaaataaggcgggcagcagatctttcaccgcatccgtatcatcttcattctgactcgcatataagtaggcgaggatctggcgtacgattctgcggctgtagaacgtctgcacgccacggtcggcatgataaggaatcgatgattggtgcagtctttcataaatggcccgtccggcgctgtttgtccggtaaagcacggcaaaatcatcaggactcgccccgttttgaattttctctttcatatccgaaacgatcatggtcgcttcttcttcttcatcgtaaggataaaacatcacgggattgtgaacgccgtctttgacggcagaaagtgttttttcataccgttttttatttttctttacgacggcatgagcgcttgagacgatcggatgcggcgagcggtaatttgccgttaagtaaatggtctttgctgccggataatccttttgaaaatcaagaatgaaagacgggctgctgccgcggaacgcataaatggattggtcgtcatcacccacgcagcacaggttattctccgggcttgcgatcatttgcataatgttgtactggacaggattaatatcttgaaactcatcaatcaaaatatgagaaaatctgttttggtactgcgcgagaatatcaggccggctttgaaacagttcataacagccttgggccatgtcatcaaaatcaaattgccgtttttcccgcttctgccgttcgtaatgttcgtagagccggtacacttttttctcccagtcgtccgcaagcggaatggtctcatgggggagatacgtgtttttccagcagccgataagctgcagcgcctggtcgacgggaaactctttttcatccaaattttcttcatagagcgcctttttcacatattgctctttttgccactccatttttaaaagctggctgccgttccattttgaagaatcataatgatagagtattttatagaaaaaactgtggaatgttccggtcacgagacgggagacttttccggctgccagcccgtactcattcgccatccgctctttcatttcggcgacggcttttgtcgtaaaggtcacaagcagcatattctcaggtgaaatgccgaggtgttcaatcatatgggcggcgcgggctgtcagcacccttgtttttccgcttcccgctccggcaagcaccagcagggggccgtccgtttccgtgactgcccgcatctgttcgcggttcaggccgatgccggggaacaaagatgtatcagctgcctcggatgttggtgaaaacggttcggccgcaggcacttttttcgggcttttccattctgagacgatcggtttcggattctctgaaatcgcttttcctttcggcaggcggaacatgcctgcctccttatactcttctttttctttctccgcttgtggttcctcggcggcgcatgctttttcacaggcggtgaagtctcccttttgccggtgataaaatgccggctgctctaaaatcgaaagccgcatcaagacaggctggtcacaatgtgcgcaaaaaatatttcctttctgagcttcttcaaaaaggaattggtaatgttctctagaatatgtatgtaaatgtatcgttcggttattcagtcgggcgcatttcaaaaaggggtcctcccattaaaaggtgttcatccatttgatagacaaagaatatcataacaaaagaaccgcgtttcaaaaagtaagattaagggaaatgaaaagcgaaggggaggggtacatatgatttatgcaggacggattcaaaaccagcagtattctcaatacgcaaaccgggcagcgggttataagcctgattacgccggcattacgaaagcggccgccctcgccaatgacagggtgtacagagaggtggagcgccgccaggaaaacaccgcagccgcagaaaagaaaatgcatgaggaaaaacgtaagcgctctctttcccgtctgccgcaaattatgggaaaaggccggttgataaatcaatatgtgtgaaaaagcccggaaatctccgggtttttttgagccgtatatatgaaagatgcggaaaggaatgattcaatttgagaaagctttcattattaattgcggggttatttctattcggcctctttactgccggaatgaaaccggcacacgcggcggagagctccgcagcaaaagatgtcactctcacacagctggcgccgcatgtctggatgcatacaagcatcggtacggcagacggaagtcccgtccctgcgaacggattgcttcttgaaacttccaaaggaatcgtactgattgatactccgtggaatgacagtctcacagagcaattaatgacacaaataaaacagcggtttcccggcaaaaggatgaccgatgccattgtgacacacgcccatgacgatcgcatcggcgggctgaacacactgtacaaatacggtgtaaaggtgcacagcacgaagctgaccgccgacttcgcccggcagcagggatatgaccggccgctcggagatttgaaaaacgtgacaaagctgcagtttggcgatatgaaaattgaaacgttttatccgggaaaagggcatacggaagacaatattaccgtctggctgcctgaggataagctcttattcggcggttgcttaatcaaggctttagaaacaaaggaaatcataccaactccgggcttttatccggatcagtggccgcgcgccgtccgcaaagtcatgaaaagatatcaggacatcagcattgtcgttccgggccatggcagtccgggggatgaccgtctgctgccgcatacgataagccttctgaaagaaacgtaaaaaagaagaccggcgctcccattacggagtgccggcttttttaactcttcctgatttttataaaactgaggaaagcaagtgcaagcgccaaaacggtatatcccgctatcggccaaatatgctgatgaaaggaagaataatctccggatatgacttcctgagccagctcgatcgagtggataaacggtaaggcataagcgatatgtttgaatgtgtcaccgagcaggctcacctccatccaagccccgcccagaaattgcacgagtgtaatataaatcgttccgatacctgaaatttgtttgtccgtaaacacagcccctaaacataaaccgaagaaaacggacatcatcgcaatcggcagcaagacagcgatacctgcgagaagattcatccactcggcggataaaccggcagcagcagctgcgataaaacaaatgacgatttgtaaaatggctaacggaagcatcggcagtgcgtaaccgatgacataatcggctgtttttaaaggggaagcaaacaaacgggtcaaaagggcggtctgtttgtcttttgcgatcagcaatgcagagaacatcgtaaggaaagcgaaaccgaaaacaatgagtccgggtgctaaatgctgaattttaaaggtatcaagcggcgcatttttttcaatcgccgtaaacagaaacaatagaataacaggcagtgcgattccaaggatgatagataagggatcacgaaaaatctctttgcggttgcgaatggcgaaatcaagcataaagacccgcctctccgtcacaaatcgctaaaaaggcatcttcaaatgtggctgaatgagtttgttttttcagatcctccgccgtgcccagtgcttttaatgtcccattttctaaaatgcaaatacggtctgccagtgcttcagcctcttctaaatagtgtgtcgttaaaataatcgtcatgtctccctttaatgtctcaagatttttccacaactcgcggcgtgaacggacgtccagccctaatgtcggctcatctaagaaataaatatccggtttcgtaatcatgcccattgcgatgctgaggcggcgctgcattcctcctgataaggttttggtttttgctctttctttctcttttaattgaaacaattcgagcatctcatctgttcttttttttgcttcttttttcggaattccgtagactccggctataaactctaagttttcccgtacggttagatgaggagcgatggctgtttcctgcggggacatattcaatttcggttttattttatccaaatcagtcgaaatactgtgtccaagcactgatgcatcaccttcatccggagaaaggagtccgcaaagcatattgattaatgtcgtttttccggctccgttctcaccgagtaaagcgaaaaattcccctttctcaactgagaactcaagacggtcaacggcggcggtttctttataatgtttcgttaattgcttcagctcaatcgcgtgcatttactcatcctcgctatctgcgtcgatttgcttagcgtttaaaatatcttttgcaaactcgaaaaagagttcttgtttaacaagtgcgataccttgctggtcatccccaagcataagcagtgaatcccccggatttatatcgaaaacatctcttgcttctttaggaatgacaatctgtccttttgtgcccactttaacagtcccgaatatgtgttttccttttggtgccgtcatgtttatccctccgaaatatgaattgtattttttgtatgaattgtaatacttcgtatactaaacatacattaaccttccataaaatgcaataaaattcatgaaacggtattgttttcataaaaaaagcactcctgccatatcaacaggagtgcttttgtttttattgtttgtattcctttatcatttccagatgggggatgcccgcatcgagaaattcttcgccggatgtgacgcggtatccttgtttttcgtaaaacgggaccgcctgcgtctgcgcatgtaagataaagctgccggcgcccttggctgccgccgctttttcaagcgcctgcattatgatggctccgacgcctaaagaacgatggcttttcattacgcagatgcgctctaattttccatgcccgtctttcaagcgccatctgccggctccgaccggctggccgccgtcatatatgactatatgctctgacgtgtcttcgaattgatcaatctcttcttcttccggaacgtgctgttctttaacaaagacctcttttctgacgaaaaaagcgtcgttcagctgtttttcagtttttacgatgatggattccaagcagttattctcctccgcctaataaaaatgtttcgtacacagtccatgagccgttatccagctgatagagcaggtgaaaacggtcgatgacttcttcgtgggaaatgtcttgcattttcagctgtccgagtacgtcggaatgttcatctgacgacagcttctggccgaccgtgacatgcggaacgaagctgtattccggctcgccggataatgctcctgagtagcatttctcactcagagattttaattcctccgtcggctctgctttcatatatatcacattattcacaggagaaaacgagctgtattttgtgattttcagaacgagcggatgcgactctttcgccgtctgtctcagctgtgatacgacctgctcgatttcctgttctgtcgcttcaaacggatctcttaccgtcagatgcggcggaatgagcgcgtagctcgggtcgtagcgtttccggtacgaatttgcgagatcctgtaatttttttgatggaaataaaacaataccgtatttcatgaaagttccctccttaaatgaatggttacagcatttttttcagcgccggcgtgatgagcggctgccagtaggtccatttatgatccccgtcgaaggtttcatacgtgtattcagactgtttgctttccagcagctgtttgagctcttcgttcggcgcggtgaaatcaagaacctggccgtccgtcgtgtgaacgccggtttctttttctccgatttgatgataaacggaaatctgtttgagatcctccgactgccggacggcatccagcacgtgcccgtcaacatacggagactgcatgatgacgtttccaaacatattcggatagtcaatcgccgtcatgagcgaaacggttccgccgagggaatccccgatcatggtgcggccgtatccgacttgataagtcgggtattctttgtcgataaaaggaacgagctcattggcgataaaccgcttatatgaggcgaacttagagccttctggatggtatgtgtttcttcgctcccgcacatttttataagggacgccgataatgatgcagcggtcaatttccccttttgacataagctcttccgcctgacgcccgattctccctaatctgaaataatcatggccgtcctgagcgatgaccgtatgatatttatacaggggggagaaggtggcgggcaggtagaccaaaacggtcatttcctcttcaagctcatgggagaaaagtgttttctcatgaatgattccgttttttgatgccacttcgcattcctccaggccgcttcttgtcttgatggttttttcctattgtaccatgaattattagaaatttctttcttcagatgcacttcttgcgagagttcagataaataaaaagttgttgaaatctattttatagtgcgttaatatagaacaatcagaaaatacaaaacaatattcttatcacgagaggtggagggactggccctttgaaacctcagcaaccggtttgctttgccgcgggaaggcaaagtgccaaggtgctaaatccagcaagcgattcacgcttggaagataagaggaagagaaaagctccttcttcttatgaagagggggcttttttatttttgaaaaaggatggtgcttactgatgacgcagcatgttgaaacaaaattagcccaaatcggaaatagaagcgaagaagcaacgggaacggtcagtccgccgatttatctgtccaccgcttaccgccatagaggaataggagaatctacaggttttgattacgtgcgcacgaaaaacccgacacgccagctcgtcgaagacgccatcgccgtgttggaaaacggtgcgagaggatttgctttcagctcgggaatggcagccattcaaaccattatggctttatttaaaagcggggatgaattgattgtatcctccgatttatatggaggcacgtaccgtttgtttgaaaacgaatggagaaaatacggcttaagctttatttacgatgatttcagcgatgaagactgtttacgctccaaaataacggaaaacacgaaagcgctatttgttgaaacaccgacaaacccgttaatgcaggaggcggacattgaaaaaatcgcccggattacgaaagaagccggcctgcttttgattgtggataatacgttttataccccggtcatccagcgtccgcttgaactgggagcggacatcgtcattcacagcgccacaaaatatttagcggggcacaatgacctccttgccggtctggctgtcgttaaggatgaagagctcggcgacatcatgtttaatcaccaaaatgcgatcggcgccgttctcccgccgtttgattcgtggcttttaatgagagggatgaaaacactcggactcagaatgcgccgtcatgaagaaaacgcccttgaacttgcagaatttttagaacaggaagaggaaatcgccgacgtgttatatcccggaaaaggcggaatgctgtctttccggctgcaaaaagaagaatgggtcaatccgtttttaaaggcgctgaaaacgatctgtttcgcagaaagtctcggcggggtggaaagttttattacataccccgcgacacagacgcacatggacattccggaagatatccgtatcgcaaacggcgtctgcaaccgtctgctgcgtttttcagtgggcattgaacatgcagaagatttgaagcgggatgtaaagcaggcattacagcaagtaaaagagggggccgtgtcatatgagtaatcacaattggacgctggaaacccagctcgtgcacaatccatttaaaacagacggagccaccggagccgtcagcgtcccgatccagcatgcttccacattccatcagtcttcatttgaagaattcgggacatatgactacagccgatcaggcacaccgacaagaacagcgcttgaagaaacgatcgcaggtcttgaaggcggaacgagaggttttgctttcagctccggtatggcggcgatttcgacggcgtttctgctcttatcccaaggcgaccatgttctcgtcacggaggatgtgtacggcggaacattccgcatggtgactgaggttctgtcccgtttcggaatcgaacatacctttgtcgatatgacggacacagaagcggtcgcctgcgccatccggccgaacacgaaagccatttatatggaaacaccgtcaaacccgacgctcggcatcacggatattaagggcgtcgtcaaactggcaaaggaacacggctgtctgacataccttgacaatacattcatgacgcctgctctgcagcgtccgcttgatctcggtgtagatatcgtgcttcacagcgcgacgaaatttttaagcggccacagtgacgtgctgtcaggccttgccgccgtaaaagatgaagagctcggcaatcagctgtataagctgcaaaactcgtttggagcggtgctcggtgttcaggactgctggctcgtattgagaggcttaaaaacattgcaggtcagactggaaaaagcgagccggacggctgagcggctggctgcctattttgacgggcatcccgcaatcaaaaacgtttactatcccggccttgccggacacccgggagccgatacccataaacgtcaagcgagcggagcgggcgccgtcctgtcctttgaattggaaagcaaagaagccgtcaaaaagctggtcgaaaacgtatcgcttccggtatttgccgtcagcctcggcgctgtcgagtccattctctcataccctgcagccatgtcgcatgccgccatgccgaaatcagagagggaaaaacgcggcatcacagacggccttctgcgcctgagcgtcggagtcgaaaacgccgaagatttagaacgcgacttcgaacaggcattgaaaaaaataacccccgcccaagtgagatcataaacgaaaagggtgccgtcaattttgcgacgcgcccttttttattttagataaaaaaagtgttgacgaatgagaaatcaggatatataattataaatgtcagagagacaacaacatacccagcaacacatacatatcatgattccgtagctcagctgggagagcgctaccttgacagggtagaggtcgctggttcgagcccagtcggaatcatagccaaaacccttgcgttgcaagggttttttactttgcttatttattgattttgtcatcattcatcgagttggggacgaattggggacggaactgcttttttgggccgattttgaagtacattcgctgtatacttcaagggaggtgaacatcgcctttaaggcggcggtctttgccgaaacctgttcattacagagaaatacagaaattccgtatcactgaacggctaaagtgataacgatcagcagctggttaatcctgctgtttttttgtatttgaaaaacggaatatttagttttgtatgaaaaatacagcgaaaatctggaaatcattcacagcacaggaaatgacgcatgcagccgctaatgaaatcagttatatgaccggtagcagtgaatcgactagatatcattttgccgtcgatgataaagaagtgatacagggggccctccatcctaaggcaagaaatcatacttccccttgctttccggttttttaagtcaaaagcccattaaaacccgaggggagagcgtaaaacagattcgaacggcgctgtcggccctttattaaagcggaagaacttcgggattgatggagcatatggagcgaaaacagcgaatgcagtaattcgatttcaattggtgaatggattaaaagctgatggaatttatgcgcttgaaccaaagcaaaacttgaagtgttgttaaaataagcggagactctttccttttttacagactctctcccacactgaacaagaagggttgtgttaaagcaaaatctaagaaattaaatccaaaaagattgcaatgacaagcttctaaagagatgaaaaatatcgggatatcaactaaggcgcaaaatgcaataaaacaggagcttgaaaaaagaaaagaaaaaacaaagagaaaaaataaaggaacaagaatatttaatcagaaaacaaaaagcaaaagaaaagcataggggcaaatagttggagaacccgctgaagcacttcgattgaaaagttgagcggcatcagttttttgcttcggactgatttagagaaaaagaagtataagtcagagcccttctcaagatgaggagggtttttttgcaatttatttaaattcacttacatcagtaaatgcggctgaacgattcagtacgattcagctcatgtatggtttgaagccagacggaatttgcggaccaaaaacgaaagcgaaattgaattaataaaagaagcccttcttaaaagagggctctttttctaactatgttgtttaagatgctttttaatttgttcagtgacttgcttaagccattctaatggagttatatcatcttcaggaaagtatataccatccgctgcttcctctataaattcattcttgtcttcttctgaataatcactatttacaaactcagttagtgctattaaatctctttcttttagtttttgtgatgcttcatttaaatattcatcaagtgcattttccggagactctatatcttggtgaaaatgtccgccgagaaatctaaatacaggatcagaaactttaatttcaatcattatatatcacctcgttgggtagcctgttagtataaagctaccatctttatttttctttaatactattctagcattagtcatatctttaacttcatttgaacctttacgaactcctctacctataacttcggttcctctataaggtaacggtaatggatcgttaacatcactttttaaccactcttcaatttcctttttatgtttagttaatgtttcattagcgactctttctgcagttggcctatcagtgaaactagaagaggcacgtatcttcttgtttatctgtagcctctgtaataactcttcatcagtcttcccaacatgcctttctagaaggtgtccgccttttgcttcgtgagcagctaagccaccgcctggtgcgagaggactgctgtctccttgtttaacactatgtatgccgttattgtcagaagtcacagatttactgagcacactctctttctgatcttcaataatacttttcaacaaaggagtattcttcacattgtgagtattttcaatatcctgtgctattccggcaagcgcgggttggtacttatttttcgaaacggaattgatataattttttcctttttcaatcccggtttttacatgttttgcagctgctttttcaccggcttccaagacgttatccactttggcggcgcctgttttcgcgagcttgcttgatacttttacagctgagccggaacctttgagcccgacgatgctcccgatggcgtaagtgatgtaatgggatcttgaatacgcatccccgttaaccattttatcattccacgaatccgccaggtttgtccatatgatttttgcgtaggagggcgtgttcaatacagccgatatggttttagcgactttttgttcatcggagagatggtaaaaatcccatgcgccgacagccagatctttgacgccggttatggtgtcttttcccacatcataaaggccgacgcctattcctttgacgatatcccaagccgtttctccgacttcttcaagctgttttgcttgttcaagctgcattacatattccacctgagcgggttcaaggttttcatagccgatcttctttgcgatttccaaatactcatccggatcggtgacaccatcagccagctttttcttcagatccttgatttcacgctctttcgcttcttcctttttaatcgtcaaataagcatccgaatgtcttgcgatatcgccttttttcttatggatgtcgctttcacggtacgctttggcgttgtagtgaagcggcgtggcgctttttcctttgcctgtggcgttttggagctgctgaaagtcggcttggataaactgttcgttcgcttcggtttctgcgtattctttcgttagatcgtgatcaagcttgccgagtttatgtatggtttcgcttctttttttgtcagctgaagaaagcttttgatctgtgctttcggttgaaaacaattcgagcgagatgatgtcttcgatctcaccgaggatggagcgcatgtcttttttctgcgcttccataatcgcctttgatttactgagggcatgggtgagctcgtgctccagaaaagattcttctacatgagattcggaaagacctgcgtcttcgactttgccgggaaggcttgtgagaaatgcgattttcatatcgatcagatcaagccagctgtctgtgacgccggcgtgatcctggaaaaaggctttgatattgtcagcgccccggcctgagaaatcattgtcaccaagatcagccataccttgaaacgctttttttaggttgaccatctgaccgcgcagttttttatattcacccgcacgctgtttggcggcggcgaggagggtggttgcttcgaaaactttcatgaccatatcctttcatgcgaaatacttcaacaagatattaccatggaagaatgaaggaaaagccaaataagtattttgaaagtgcaaaatgattaatttgttctgggtaaatttacttattttatgatcgggaattggggtagagttagctttaggttgaatcggttgttagaacatcatgtgacgcacttcctttaaaaagcatacacacacatattagagggctgaaatttacccgaatgaattaggatacggcggcccaaactgctttccgcatggaatcaacctgggcaactggtcaatagctttaaaaacttcatcataacagggaagtgcggcgggcattgggaatataaaggaatataggcttacagctatgcaggatggatgaaaatccgtcagacggcgaaggaaaggcaatctccatgtgttgtgacagttcgaatgcgggggtacggaacttcccattcatccgagttatgtcagagggacgaaaagacttttttgaggaggaagcggaatgattaaatttacacggccttcacctatgaagaaaacatgtacgatgcacccggaaaaggaatctgtcagatcggtttcgtttactgattttaacggcaattctgtaacagtaacactttgtcaaatgtgtctggctgaattaaaaatgaaagccgcgactgaatacaggagcatgaccgaggagcgggccaaactgaatcgtttcaagattggtgatcatgtgtatttagagcatttgggagtcgtcagcgagataaaaaacatggaaggcgctcaagtggcaaacaggacagacacagacggagtccggaaggctacccctaaggaaatcgcagaatataaaaaacaggggaagcgatgacggtgaaaaaacgactcagtcaattatttatcagttgtgttacttatgggagcgggggccggatgtttacgggtgcgcgacttacacggccggagcctccacggtggagaggaggagaattcaaactaagaatgtgaattgatcaaacgcagtttcatgaatcttcgaaggctttccatccgaaatttgggtgcagtatgggaaatttttttgtggaaacttgacataatgctgtcaggtccctattgtatgattaaatgaatggccagtaaaatgataggaggcgttcaatatgaaactgctgcaaattagactattggttaatgactttaaaaaaagcgtcgagttttataaagattcattaggacttccaataagttggttagagaaggaaatggaatatgcacttttcgataatggagaaacgaaaatagagcttttatctcaagaaaatatggctgaaatagttggagaagaaagaaaatctttagacggagattcgcaatcgagatttttgcttcaatttaaggtagaagatgttgataaaacgtatgactatttgcacaagcaagggattacatgcgtcaatgaaccacatgatcgtcaggaatggcgtgcacgagttgctcatttcagagatccagataataatcttattgaaatatataaaatgatataattttgaccgcgagattaaggtaatgcgtttgttaacttaccttatgatttttatagtctgcaagagaaacatatatagatccaagacggaaagcctgcggacactgatcattgcacagctcactatgctctgattggtgtccgtttttatttgcacggagggataacaaatagataatgaacacgaagcggacatgcaaacattcagacgcggcaagggcggcgcatttaataaggggaggaatcagaatgcaggatttaatcattcacaggaaatatattgactttcatcctgtttgtaatgttaattagaagatgtatacaaaaacattataatgaggaggtctggatgtgaaaaataaagcgggaatacaagttggaatatgcattgggcttttatgtttaagctttaccggtttcagccctttattcggctctacgcacgctgaagcaaaatccatagaaaacacaaaaatgacaagctgtataacgaatcaaaaatttgttcagcttgagaaaaaatttgatgccaggcttggggtttatgcgattgatacggggtcaaacaagacaatcgcctatcggccgaatgaacggtttgcttacgcatcaacctataaagttctggctgcagctgctgttctgaagaaaagctcaaatgaaaaacttaatgccatcatccgctacagcaaagacgatttagttacatattctccaatcacagaaaaacacctggatacaggcatgagcctgaaagaaatctcagaagccgctgtccgttacagcgataatactgcggggaacctattgctgcagcagcttggcggccctaaaggtttcgaaaaatcactgaaacagattggggatcatgtaacgaaagcggatcgattcgagacggatctaaactctgcgattcccggggatcgtcgtgacacaagcacagcaaaggcactggcaaccgatcttaaagcgttcactttgggtaacactctcacgactgacaagcgcacgatcttaacggattggatgcggggcaacgctaccggcgatgaactgattcgggcaggcgctcctgcaggatgggaagtcggcgataaatccggagccggaagttacgggacgcgaaacgacattgccatcgtttggccgcctgacagagctccgattgttttggcaatcctgtcaaaccgatttacagaagatgccgattatcataatgctcttatcgctgaggctgcaaaagtcgctcttcatgatcttaaataaacattgccgttcattttttatggacggttttttatatgttgagaatgcggtatgcgggtttcgatgttataatgtaaagccataaaatgatgggaagagggggagtttcgatgcattacataacggcatgcttaaaaatcatcagtgataaagaccttaatgaaataatgaaggaattcaaaaacttgaggaagaaacgaacaaagaagaaggctgtattcagttccatgctcatccgcttgaaccatcagaacgcaaaattatgctttgggagatttgggaaaacgaagaagctgttaaagtccattttacgaaaaagcacacaaaagacgttcaaaaacaagaattaacggaagtagaatggttaatgaaaagcaatgtgaatgagtaaaaggctttgtatgttgttggctgactctgccggcaacaatcatcagtttcattcattaaaacccttgctgcgcaagggttttttactttgaaaagttctttatatcgcagtctttttatgggtaaggaacagacttggaatgaagatggccgcaaggatgatgacggatactaagaatccggcatggtagccttttaaactgttcggaatcgttggctgcaatccttgtatgacagttgcggtaacggttgcgatcacagctgacccaaagctggaaccgaggttttcaatcatatgaataccgacacctgcttccggaagctgtttgctgtcaagacctgtataagcgtcactcattaatgggagcataattcctccaaaactggtgccgcggataaataatacgacggaaatccaaatcatacttgtgttatcggtgataaaaataagcgggatagatccgatcagcgaaagaacaagactgaccgtaaccacgtatttcgcaccgatcttatcaatcatttttccgatcagcggacgagtcacgagcattccgactccttgagggattaaagcgagtgctgctccgactgccgtgaaatgacgaatgtcttgaaaaaacagcggaagtattaacatcggccccatgatggcaacattcgctaagaacaacccgatcgaagatgctaagaagctcttgtttgcaaacaaattcataggcagcacggtttggtttttcttgatcagattatatacaagataaatgactgctgaaacaagaccgatgcccgcccataaaatggtgtcgctattgttaaatgatgcatgatccgccgctttcgtaataccgtacatcaatgccgcgctcattaatgacaaattgataatcccgaaaatatcgagtttacgatctttgttgaatggttcaaagtctggaatggttttcatcataagcggtgcggcaaccaaaacgatgaacacgttgatgtaaaaaatccaatgccatgaagcgacttggacgatgaagcctccgatgacaggtcctaagatcgggccgaagatcataggggtgctgacgattgccatcacttttcccaggttttccggacctgccgttttaaccaagagtgttgacataagcggagtgataatgccggcgctgaatccttgaagcaaacggaagaagatgaagctggaaacgtcacggctcattcccgcaaaaacagaaatgacaccaaaggcgatgactgagccgatgaagattttcttaccgttatatttattcataagccagccggatacgggtactgcaatcgcaagtgctaacatatagcctgtaacggaccactgaatggtatccaatgtcgtgttgaagtctttggtcagtttgtcgatggcgatgtttaccatcgtagagtcaagcattggagcaattgctcccagtgcaatagcccaggcggctgtgagaacttcttttggcagccgaagttcctttcttttatgtgttgacatattattctcctctcaaaatcgccgtatttgtttccttgtcaacaaaataatagagtgattttgtttctttgtcaacaataagagggatataaaaaggcagcccgttttcatggagcagggctgcctatggttttattccgatttcatgtctgcaccaagtttctttatttctgaatccaaatgcctgctgtatgtttccacgaagctcagcatcgtgtcaaattgttcatcagttacttgttcaaacacgattttgtcccgttcttgaaactctttgtgcaattcctcgtgaattttataaatgacttttccttgctcggtaagcctgaaatagatttctttcttattaagcggcttctgatagctttcgataaggcctttattgataagcttcttcgttaatttacttatagcgcctcttgtcatataaagggactccgcaagttttgtcacattggcgtcttcaattttttcgatgaattcgatgcaatgcacttcagaaggtttatgccccttaaggctttcttccatcttcagcctattcagccacaccatcttgttaaaaaagtccctgaaatccgtgaggagctgttcttttttgtccatgacccgtcctcctgctcggtggtgcttacacaatattataaaatgtttgtttctttttcaacaatcgtaaagttattatttaggaactgagagatagtgcgcagaaataagaaggagggggaacagaagaagtatcctatttttaaccgaaatgtggtttttcgagtatgtttctttccgtattcgttattagctcttcataacaggctaactctgcagccttacaaaaaagcaggctgcgaaaagagcctgctttagaattgcatcaatcattttcctgttgcggcatcataaaaagcgtcaattgcggttgtgtatttcaagacgtttttagacacttttgcggttgcgcctaatggatacgcatctgacagaacgctggagtgagcttcgggttcccagtaaaatacgccggttcctttgccgttcggaacggctttcaccagttttatggtgtcttttatggtccagtaggaatctttcggattattttcatctccgcccagttcaaccaccatgacttccttgttgtagcgtgaggcgatgtcattcaaattagatgataaatggccggtgagctcccagtacggcttaccttcccaatagggatagaacgaaacgccgatgatgtcggttttccctccgtttttaaagaattgatcaaaccaccatctgaataggctgttgtccgtgccgtgtgctaaatggctgattaccttggtggccgggctgacggatttcacggcgtcatagcctttgttcagtaagccggtcaatttgctgaaatcgctcgtgctgccgtcgggcagtaaaattcctgaattcatttcatttcctacttgcacccaatcaggagagatgccgtgatttttaagttctttcatgacatcgtacgtatggttatacacggctgcctgcagctggctgtttgaatagccggtccattggttcggcttgatctggtggccgggatcagcgaacacatcactgtaatggaagtcaaccattactttcattcctaacgcttttgcccttttggccgccgcaagtacgcccgctttgtcactatagccgagcatcgtccatgttgtgccgtctttcagccaataatagctgcttggcggattcacaaacactctcagtctcacggcatttattccgtgatctttaagaatctgcaaggcatctttctgtttcccgccgtcatccagccagcgcacaccttcatcctccatttgtttcagccatcctatatcagcgccataggcaaacggggcatccgcttttgctttaggagacttctcaagaaatgtaaaagcggtgaaaatgagagaaagacagattgcgtttacaaatacacgtttcaatcggtttttgaacatcacaatacctcctgataaaaaagattgttgattgatttcactctgaatgtttcagctgtcattctccaataacgtcgtgaaacgctgaaacgcctgaattccttcgggtgtcattttaaaaacgcctgcatcggtcagcgcgcgtaaaaatacattcgcggtttctctttgtaaaacagcggctgcattttccggtgtcacgtctttatccgctttgatgttttcagcccacggaagatgaatgtccttgatgtcatgatgttcattcagtaaatactttttcacttctgccagctcatctttcagacggggaggtaaaacggcgagccccatcacttcaatcagaccgatattttcttttttgatgtgatgaacgtcttgatgcgggtgaaaaatgccatccggataatcttcggaggtgcggttgtttctgagagcgagatcgatttcaaaatccgttcccctgcgtctggcaatcggggtgacggtattatggggttcatttgtcttcgcgatgatgctgacggtttcgtctgaatattcccgccacttttcaaaaacatacgcagcggcatctgtcagcaaatccggatcttttgcgcgaaggcggatcactgataccggccacttcacggcttcggcctgaacgtctggaaaatgacgcatatgaaaagggtagagggaacccgcttttgccatgggaaactcatgggcgccgccttgataatgatcgtgtgaaagaatggaacctcctacgatcggcaagtctgcgtttgatcccgcgaaataatgagggaaaatttccgtaatggccagaagccttctgaagctttcgcggctgatgttcatcggcttgtgcacgcttgaaagaaagatggcatgctcgctgtaatacgcataaggagagtattgaaaaccccactgttctcccgctaagtcaagcctgatgatgcggtggtttgaacgggcggggtgatgcggtgttccggcatacccctcgttttccatacagagcagacatttcggataccggttttccggactgttttttaccgcggcgatgtctttagggtctttttccggttttgatagattaatggtgatgtccaattccccaaaaggtgttattgagcggtacacgatattttttcgaatggcccgcgtcttaatatagtcgttgttttgactcaatctataaaaataatctgttgcttttttcgggcaatctgataacaattcgctgaatgcgtcattgatcagagaaggggccggtgtgattacgtccatgattctgcttcccagcatgtctctttcagccggcgtatcgtttatgattgaccgttttaccgcgtctttcaccatttcgtccaaatagtgaagcctgttttgtttcttgatacgtttcggttctgcataatccgtcagtccgagcagatcgagaagtctgtttcttgtataaatcacatctgtttcatttatgtcgcctaagacagtgctttctttcagaaaccctgccactgattcaaaaacgtcaatgaccgccgcctccatttcatttgtccttgtatccgttaggatgatgccgatgccaattccatgctgacgcaatgatttccgatatgtccgtttgtttcggattccagccgagaatgttccgcgctttatcgctggaagcgatgagggcgcttggatcaccgggtcttcttgcggacgctcttacttttatgtctctttcggtcacttgccgggccgcttccgccatttctgatacggaaaacccgctgcttgatcctaaattgaaaatgccgctgtctccgccgttttgcaaatattccagagcgagaatatgggcatcgattaaatcagaaacatgaacataatcgcggatgcacgtgccgtcttttgtatcatagtcagtgccgaatatcaaaacctcctcgcgctgaccgagcgcggtttgtaaaaggatagggataaggtgggtttccggatgatgatcttctccgatggaaccgtccgttttcgcgccggcaacgttaaaataccgaagcgagacatattttatgccgcaagcggtatcgcaccacttcagcattttttctgccatgagttttgattcgccgtatgcgctttccggcttttccggcatgtcttctgtgatgggcgctttttcaggttcgccgtaaacagcggcggatgaagaaaacacaatgtgtttcacttcgaattcctgcatgacctccagcgtaatttgcgtaccgtacacattattattgaaatatgaaagagggtctttcattgattcgccgacaagggattgagcggcaaaatggagaacgcctgttacgttctccttcgcaaatacagagcgaagaaacggtttgtcacggatatctccatggtaaaaaacggctttttcatgaacggctttccggtggcctgtctggagattatccacagctatcgtttcaaatcctttgtttactaattgatcaaccgcatgagaaccgatatagccggctccgccgagaacgagaatcgccatgatttatttttccctccattcagccgcgccatcgcttatatccgcgatgtagaaagaagcttcaagacctgtcctgctgcggtagtgagatgaaacggcccggataaagccggcggtttcttcactttccacaatggctatggcgcagccgccgaaccccgcgcccgtcatccgcgctccgagtgctccttctttccaggctgcttcagccagcgcgtctaattcgtcaccggtcacttcgtagtcatcacgtaacgaacggtgcgacgcattcatcagctccccgaacgttttcaaatcattcgatttgagagcttccgccgctgagagggtccgctcgttttcattgaccgcgtgccgggctcttttacgcaaagtttcacgggagagaagaggttcgagttcgttgaattcttctcccgtcaattccgcaagtgatgcgatattttgatattgccgcagttccgtgagagccgcgtcgcattcgctgcggcgttcattatactttgaagccgccagctcccggcgcttgttcgtattcataatgacgattttatatccgttaaaagcagccggaatcatttcgtgctcaagcttatcgcagtttaacagaatggccatgttctttttgcctttttgcactgcgaattgatccataatccctgaattcacgccgataaattcattttcgactctttttccgataagcgccagttcagtatcggaaacatccaggctgaataactttcttaaaatggaaccggttaacatttcaatggaagcagaggagcttaaaccggctccgtttggaatcgtaccgtgaaaaagaatatccattccgctgtctatttggccgccggcttcaagaaggtaatggaccatccccttcggataattggcccagccgtcttcttttttgtatgcagtggcggaaagatcaaggcagacaatgccgctgtcaggaaagttttctgagtataaccggatctggtgatcttcgcgttttgcgcatacggcatatgttccgatcgtgatcgcgcatggaagaacgtgaccgcctatataatccgtatgttccccgatcaggttgatccggccgggtgcgaaaaacagttctccgttacttctcttgaaaatgtcttcgaatcttgatttcaaaagtttggcatccatggtaaacctccgattctattttgaggtatgctccagtatgaactgaatggctttttgtgaatttctggtgaggctgatatattccgctcctttcgttgcgacgagtttcacatgcaggcggtccgcatcttctttaatgtcatcataataagagccgacttgcggagccaaaatgatcatatcgaagtctttcatgatgtcgtaatgggatccgtaggcgcctgctgaggcggtgatcggcacgttgtattcttcggctccttcggtcagtgcgttcgcaagcatagcgctcgttcccgctccggcgcacagcactaacacattggtgccgtgttccaaggcggatgaggattcctgaagatttgtgctgatgacggtggccgcgtcttctgaggcgccggccattacgggctgtatctcccgggatttttgcggcgcggtttcaggttcggtatgttgggcttcttccgccgctaatactttgtcataagctttacagaatggcaggtatatcaggaaatcgacaataattaatacagccgtcagaacaaaagccgagagccccatgccggttccgagaatcaagccggcgggcgccggggtggcccacggaagaacatacataaaactgttcattccgatgacatccacgaaaaatttaaacagacagacattcaccatcggcgttacaacaaacggaatgaaaaaataaggatttaaaatgatcggcgcagcaaagagaagaggttcgtttactgcgaaagacaccggaaccgcggatgcttttccgactgctttcaattgcttggatttcgcgaaaagcagaaagataaacggaacaacaagggttgcgccggttcctcccattgtgccgacgaagttcccgagtccgacggtcagcacgttggacgcctgctcgccggcattatgaagctgaaggttcgcctccacatttgcgtaaataatagctgcgatggccggctctacaatagaaggcccgtgaacgccgacaaaccagaacagcgccatcattccccaaatgacacaaatcccgagataaccgtctgcggcggtaaaaaatggcgataagagagaggagagagcctccgcaaacgatacattcagcgtattcctgatcaataaatcaacgatcaccatggccaaaacggaaaaagcgaacggaaaaacatctttaaatgtttgtgaaatggtacccggtacttctttaggcattttaatcgtaatatttttcagcacgcagaatctgtaaacgttcaccgttatgaaagcggatacaaaagcggctaaaagaccttttgtgccgagatattccgcggagaacccgccgtcgatttgagtgacgcttaaaatgagaaacccgacgactgaagcaagcatcgctgaaacggggttgatccctttgtttttcggcatttttcggttcattgattcactcaggcatttcgcacttgttgccgcaacgatcagaccgagggcgcccattgaatagttataaactttccaaagccattcagaaacacttttaggccaagtgaaacccaacacttccggcacagcggcggtgaggatgaaaatgctggcgaataaaataacaggcatggcagttaagaagccgtcgcggatcgcgcctaaataaatgtttcttgagattttttcgaaaaacggttttcccttttcgatttgcttgatgataccgttcatttttccactccttatcggcggcttcggtagagttctataaaatcctgaataagatcacggagcaaaagggttgtcatcaagtggtcctggccgtgaacgaaaataaaccctaattccatgtccttgccgtcagcttcttcagctaacattttcgtttgcgcattgtgggcgagggttaaattttcatcggcgcttttcaatgctgcttccgtgttttcgaagtttccggcacggacttctttcaggactttcaataaagtgctcctggcgtcgccggcataggcgacgatttcaaaaccgagcatctgcaattcttcctttgtcatgaaaaaaacctcctaaagacggcacacatgatggaaagagattcttttcatcatgtatgatcgttaaatgattgtttttgtttcacttacaagtttgtaccagtaggccgattctttcggataccgtttttgggtgtcgaagtcgacgtaaaaaagaccgtaacgtttgttgtagccgttggtccatgaaaataaatccattaaggaccataagaagtacccctttacattgactccgtcggtaatcgctttactgacggcttctaaatatacttttaaatagtcgattcttgccttatccataatgatgccgtcttcaaactcatctttatagcccatgccgttttcggtaatgtaaattttgttatattgcggatagtcccgtttgatgcgcatcagcatgtcatacatgccttcagggtaaatgagccagtcccaatcggtccgcttcaggccttctttgtaaattcgttcgccgattccttttactttatagaccgaagtgcccttatcgcccgttccgttatggtgaataacggtttctccgtcgtacgctttgacgaaatggcattgataatgattgatgccgagataatcattgcgcgttgaggcttttttcatcacgtcaaagtcactgtctgaaaactcgtatgaagcgccgtttgcctcacagatttcatccagagcacgcatggtttcctcagaataatagccaaggtaggtggcatcgaggaggaatctcactgataacgcgtcatccagaaaacaggcgtggcggtcttcttctgtgccgctggcgggatattttgtttccaatgagtggacgaccccgatttctcccggataaccgccgtctttaaaaaggttgacggtcatcgcatgcgctaccatcatgtgatggaggcattgaatgacttttgtgatatcacttttaacagatggcgggaaaaccccgagtaaatactggttggtggctgtgggataaatttcgttaaacgtgctccaatatctgatttcgctgaattctttaaagcaaaactccgcatagctgacgaacgcttctattgcagcgcggttgaggaaatctccctgatcaaataatcctttcggtgtatcgaaatgatgcagcgtgacaaaaggggtgacgttgcgtttatggcactctgagaaaatacgatgatagtaatcaacaccttcctgattgattttgcccgtgccgtcagggaaaattctcgtccaggctatagaaaggcggatgccgtttattccgaatttttcacatagtttaatatcttccggaaactggcggtaaaaatcacttgccggatcagggctgaatcttccctgtttttcaagaaattcatcccaggccacagggcctttgccgccttcttttgtggcgccttccgcttgatatgccgcagtcgccccgccgaaaataaagtcatgaggtaatttgagcattactgaatcctccttcgccaatgtgtgaattggagtttgttaatgtttgtaattgttgtcttttgtttaatagtaaacgcatatatttttgttgtcaatagcttcataaagaaataacatctgtgtttatagaggttatataagtttttcgttgttttacatgttgattatgttgtttgttaatgtttatttttgttgaccggattgccgcagtatgttagattgtgtgtaaagttgaggggatgattgaacatgttaaaaaaagagcgacttttaaaaatcatcgatatcgtaaactcgcgggggtttattacggtgagtgatattatcgatgaactggaagtttctgatatgacagtgagaagagatctggacgagctggataaggccggaaaaatcgtacgtattcacggaggcgcacagagcatatcttattccattgatcacgaattatcgcataatgaaaaactcggtgttcaaatggaggagaaggggaagatcgcggaactcgcagcttcctatgtaaatgacggcgataccgtttttttagggcccggcacgacgattgaacttttagcgaaacacctgctgcataagcgaatcaggattatcacaaacaactatcccgtatttgatattttgaaacatggcgacactgcggataccatcctgattggcggcgacttccgaaaaaataccggtgccttcgtcggccccatcgtgaacggcaatctgcagaaattcaattttacgaaggctttcatcagcgccaacggcatacataatgatgagatttcttcttacagcattgaagaaggggaagctcaccaaatcgcgctgaataattcgcggacgaaatttttgctggcggataataaaaaatttaaccgggaagatttttacgtgttctataacttgcacgatatggactatctgattacggatgataaagtcatgaaagatgttcaaattcattacgagcaatatgtagatgtcaaaatcgcaaaaaaataaaaaaggcgggcggttcgatgaaaggggttatttttgatttcaacggcacgatgtttcaagattcgcatctgcacgaaaaagcatggtttttcatggtgaaaaaatacgcgccgaaaaccatttctgatgaagacattttcgttaacattcacgggagaacaaacagtgaaatcctgacgtattttatttccggcgatttaacaaatgaagaaatcaggaagctgtcttttgaaaaagaagcttactacagagaattatgccttgaaaacaaagacgaattaaagctgacgaagggactgaccggcgtattgaatcatctgaaaaaatctgaaacgccgatgaccatcgctacggctacggtaaaggaaaatgtcgagttttactttgacgtctttcatttggatcagtggtttgattttgacaaagtcacgtttgatgacgggagcttccccggaaaaccggcgccggatatttttctcatcgcatcggaaaagttaggcctcagacctgaagaatgcttggtcattgaagatgccttttcggggctcacagcggcgaaaaaagcaggtgcgggcaagattatggccattgacccgcacggaaaaaaccgcgcgctatttgaagaaaaacagctggcgggtgacgggatactgacagatttcacctcgttttttgaggtgattgccggacattctgtttgagagatgcagttggattgagagtgatctttactttaatgtgaaatgcctttggttgaagctattatgagcttcattaaggattcattgagaggtgttattctatattacacttatatactaaatttttagtaaactgttggccaataaccgagaagtgaaaaccaaatcacttttaaatccagaggcctttttcaatatttctttgatcgaaagtaagtgatcttggatcgcttagttaaatgaatctcttgtcatacgatcgccatctataaatggaattatcacaaagatgagaggaatgaataaattgacagagaaatatgacaagtggacaagattacttgatatgattgaacctaattatgcttttgaatcagcagttgtgggtaactctatttatgtattgggaggtgcacgtaatcaaaaatataacaaaaattatagttttgacaccataagtcaaaaatggacgcaaggattagatatacccacacccagggtaggttcatgcacagcagtgataggtaattatatttatgtattgggcggttataagggagcaaatgtttacagctctgtagatgtttatgatactaaaacaaatacatggggacgtgtacctgatattccgaccccgacttgccatgcatcagccgctgttattaacgatacaatttatttgattgggggattcgacaccgatgctgctcattcgcaacattatgcttttgatactttatccaaaacttggagtgttaaaaaagcgcccccaattaatatatatgcaacagaaactgaagtttttaacggaaagatttatttagttggcgggcaaactaaagaagtagttcaaggacatatcagaagcgatctaaacgaatatatttacgaatatgatcctgttatggatagatggaatcgcaaaaaatttttaggacctttgcaaaatacttcgacagctgtccttaataataagatttacattattggcggtagaaaaaatccaagtgtgattgagcctttaacaaaagtatatgatccaattaaagatgaaattagcgtagaaaaaccctatccttttgaaagatatgatgccagaatagccgcagttggagacaatctttatctttttggcggtctaacgccgtctggatatgcattagaatatctgcatgctcttactccggtaaaaaccgaagaggataaagatggagaaccaaagaatcctgaggaaccaccaaataaacagcccgccagtaatcgggcaattcttcttgttacaatgaccacaggtcttgagaaagaatttgatctttcaatggaagagattaaagattttatcagatggtatgatcaaaaaagttctggaataggcttatctagatatgttatcgagaagcactataataatatagggccttttcaaaatagaagggaccatattgtttttggaaacattcttacttttaatgtgagtgagtacactttagataaataattacctgttttccttctgcagccctcttttttaaaaagagggctttttttatgaggtgcttattctttttcagttgcgcttttgtttttgtataatgattttctcattgaaggcggcattttttgcatcagaaaggtgttcgccttaattgaaatattggctgaatttatagattcgcagagataagggagtcgtaaaagatatgccgtttgcggatttcagcctgtcttttgagaaggatcattcttcaatgacgcttatttcccccgtaccgaaaaaaagtgaaacacgttctcctcgcttttcataggttttgataagtccttcctgccctttaagtttccagcctttttcggctatttccaattggtataaaccgctcggaccttcttcttcttttgcgaaacggtatgtatagtttgaaacgtattttcctttttcatattcctttgttttagtgtgcatagcgaataatggcaccgggaaatcagggtgagaaacagctgctttatatcctcccaaaataaataagctaaataacaataatataaaaaaccacagaatatatttcataaaacctccttatgtcaattagtcggtgcattttaaaaaaagatacaccgcatgattgggttataaaagcgggtaagaagataaggaaaggagagagacggatggaacttgattttgtgattcgtctggcggttgcgggtctgcttggggctcttattggattggagagagaattcagggcaaaggaagccggtttgaggacgcattttttagtggccgtcggcagcgccttgatgatgatcgtttccaaatacggcttttttgatttgttatccaacagccatacgtcctttgatccgagccgggtggcggcgcaggtcgtcagcggcgtcggatttttaggagccggcacgattattttgcagcggcatgtcgtgcgggggcttacgacggccgcggggatttgggctacgtcggggatcgggctgacgatcggggcaggtatgtatgtcatcggcatcagcggcacgattttggcgttaatcgggcttgaactgttaaattttctgtttaaaccggcggcgcattctttgtctgtcagtttcaggattgaagagaaagccgtcatgcatgatattttaacttctcttgaggaaaaaggaattctgattacgtcctatgaattgaataaggcggtgcttgaagtgaagggaagggtgaaaagcaaaagcgggaaagcagcggtaatggagaaagttcaagccctcccgtatatcctgtcggtcaaagttgaatagcagacaggggaagcctcctgtctgcagtcatttcttttcaaacattaataccaaggatagaacgggatatacggccgcggatagtatgggtatggtctggggtaataataaggcggccgcggatagtatggatatggtctggggtaataataaggcggccgcggataatgatatggcacccgttcgtggctctcggctgtgtattcatgatcgaaaggatcgtacaagaggaaaacctccttttcaaatgttggttccgtttaccttattcctgtatgcccggtacggtgtatgtacaatgggcaaaaaaaagacgccggttatcatccggcatctttttttacactttcacatcaattgaatggccggcagtcgggtgctgggacggcagcattttcactgtttcttccgccgcagcctgtgcatgctgcatgaccgtttttgttaaagcgatatttacattctgcgccagagatgactgatgcattgcgattgataacgcagggatatccatagcttccacctccttatcccttcatatcggcggcgtgctccgattatgaagagggctggcggtttctttttacggcccattctaaaagtgcggcagcgcataccccgagggtataggcgaaaatgtcactccagacaaattgccagccgaggatcagcccgccgagcgtgctgcttctgatcgcgtcaatccatggcgcgtgatacagctggctgcattcaatcagacagcaaaacgagaggctcaaaattgcggctgtttccgtccggatgtgccgtaagaaaagcccgaatcctgtaaaaatcatggccgcccacaaggcatctcctaaataagcgtttatgatgccgggcaatagggcggtgatgtatgcggttctggacagcaaaccgagggcgatgataaaaacggtacatattccgtatgtcaatggatgtctattcacttcacactgttcccctttttttgtactcccatgtattgtaaggaacgacggagaagctgtctatgaaaaaacggcccgggaggccgcttttttgcgttatctggcttttaggttgacatgatctgctttttgatcactgccgatgacgaagcggagctcatactgccccgtatggtagacgtaatctgtttcgcccgtttctggcactgtcaggattttgtcagcgctgccgatttgtttgcttaagacgtcaggtgtgacgctgccgaggtttaagcgccgctcgacccccgttccaaaatagcgtatttccgagatttttccgtttttatgataggaaaatccatacccggggtttcccatgttccagctgtataaatcaaatggattgcggctgtctgctttttgttccggctcgccgattttattgtaaacgtcctgtcttgtgctttggttgattttcaggcctttcacattttgcggcatttcccctttaaatgccgattggtaaaggctgttcaccagttcttgtgcacgctggttttccgtttttgaagcggctgcggcatggacgggctgtgtatccgaaaatgcttctgctccgaaagcgcatcccgtgagcatcactgccgataatcccgtgacgagtgtttttttcttcaacatgtgaacgcctcctttttaccgctcatacccgtatgtttcctgagataaacgagatgttttagtgaaaggccggttgggaatcatagaggatgtatagaggggtacagaaaggggaaagaaaatggctgatacaaagaaagttacaatcaatggggttgaaatggaagcgccggacggccaaaccgttttgcagcttttgaacaatagttcaattgacgtgccgcacgtgtgttatcacccgagtctcgggccgattgaaacgtgcgatacctgtatcgtcaatgttaacggggaactggtgcgttcgtgttccgcgcaaataaaggacggagatgtcattgatacgctttcgtccgatgtaaaaaaagcgcaggttatcggcatggacaacattttgcacaaccatgaattgtactgtacggtctgtgattacaacaatgggagctgcgaaatacataataccgtaaaggaaatgaaaatcaatcatcaaagcattccgttcgatcaaaaaccgtatcctaaagatgaatcaaatccgttttaccgatatgatcccgatcagtgcattttgtgcggacgctgcgtcgaagcctgtcaggacgtacaggtaaccgaaaccttaagcattgattgggagcggaaacgcccgcgggtcatttgggatcaggatgtgccgatcaatgaatcatcatgtgtttcctgcggacattgttcgacggtatgtccgtgcaatgccatgatggaaaaaggcatggaaggcgaagctgggtatttaacaggcattaaccaagagacgcttcggccgatgattgatatcacaaaaggcgtcgaaaccggatacggatcaattttagccatatcggatatggaatcggccatgcgggatgaaagaatcaaaaaaacgaaaaccgtatgcacatactgcggtgtcggctgcagttttgatatatggacgaaaggaagagacattttaaaggtcgagcctcaggctgaggcgcccgcaaatggaatttcgacgtgtgtgaaagggaaattcggctgggatttcgtcaatagtgaaaagcgccttaccaaaccgcttatccgggaaggagactcgtttcgggaggcggaatgggatgaagcgctgcagctgatcgctgataaatttaccgatataaaagaacatttcggcccggacgcgcttgcgtttatcacatcttccaaatgcacgaatgaagaatcatacgtgatgcagaagcttgcaagagccgttatcggaacaaataatgtcgacaactgctcacgctactgccagtctcccgccacggccggattgttcagaacggtcggatacggcggtgattcagggtcgattacagatatagaaaaagctgagctcgtgctgattatcggttcaaatacatctgagtctcaccccgtcctgtccacacgcattaaacgttctcataagctgcacggacagaagctcgtcgttgctgacttgcgaaaacatgaaatggccgagcgctccgacgtgtttttccagccgcgtgccggatcagatattgtctggctgaatgccgtatcgaaatatctgcttgatcacgatttggcggatactgcatttctgaaggagagagtgaacggattagatgaattcgtgaaaagccttgaaccttatacgatggaatatgcggaaaaacataccggtgtggacaaggataccttaattaaagtggcccggatgattcatgaagccaaaagcgtatgcgcactgtgggcgatgggggtcacccagcatatcggaggaagtgatacgagcacggccatttccaacatgcttcttgtgaccggaaattacggcaagcccggcgcaggctcatatccgcttcggggccataataacgtgcagggagccagtgatttcggcagtatgcctgacagcttccccggctatgaaaaagtaacggatgaaaaagcccgcaaaaagtatgaacagggctggggaacagacctgccgaaagaaatcggaatgacaaatcatgaaatgatcgagggcatccactcgggaaaactgaagtgtatgtatgtaaaaggggaagaaatggggcttgtcgactccaatatcaaccatgttcatgccgcctttgaaaagcttgatttcttcgttgtgcaggatatttttctctcgcggacggccgagttcgccgatgtggtgctcccggcaagcccgagtcttgaaaaagaagggacgtttacgaatacggaacggagggtgcagcgcctttacgaagtgtttgaaccgctgggcgattcaaagcctgattggcagatcattacggacatcgccaaccggctgggcgctgattggcgctatgaacatccggcagacattatggaagaagcggcaatgctttcgccgctctacgtaggcgtcacttacgaacgtctcgaaggctacaattcactgcaatggccggtagcagcggacggaaccgattcaccgcttttatttacggacaagtttccgttttcagacggcaaagcgattctatatcccgttcagtggaccgagccgaaagaatttgatgaagaatatgatatccatgtgaataacgggcggctgctcgagcattttcacgaagggaatctgacttaccgatcaaaaggaatatccgaaaaaacaccgagtgtgttccttgaggtctcgcccgaactcgccgaagaaagagggctggaagacggaacgcttgtccgtctgacatcaccgtacggaaatgtgaaagtcaaatgcgtcatcacagacagggtaaaaggcaaacaagtctatctcccgatgaacgattcaaaagacgccgccattaaccttttgacaagcagctatgcggataaggataccgatacaccggcatataaagaaacatcagcgaagatggagattttgaaaaaagaaggcgttaatccgcttccgaaaatcaatttccgttacggaaacccgcagccgcagatcggtgtccgggttgatcggaaatgggcgcgtcaagattatgtatttccgggagacgccgtaaaaagggggaaacagcagaatggctaaagcaatcagcggcatccgaaaacagaccgtcacagaagaagacaaacgaaaaaaggacttagaagagatcgagacggctcttttacgaaataaagacgcgattttggaatctctgcacattcttcagcacatgaacgagcgcggcgttttggcgcttctgcgcgggctcttcggccaaggagacaaagtgatggatatcctggtgaagaaggcgaatacgccggaaacggccaatatgctgaaaaatctcctgctgttaagcggcgttctcggcatgctcgatgtaaaacagcttgagccgtttatcgttaaaatcaatgcgggcgtcacaaaggccgtcgaagaaaaagacagcggcaggaagacgggttattttgatatcgtccgcgctttaaaagacccggaaatcaacaaggccgtcactctgctgttttctttcctgaaaggcatgggcgctgatacggacgatatggaaagaaatacgcagcctcctgaagaccaaaagcagcaccagaaaccgcagacgaatgagtgaacatttctcccgagcctggctgaaggctcgggttttttgtgcgcttctgctgttttcttgggagaaatttcacctccggattcatgacttttgttgtgttatgttaatagttaaggttatgaatagaaaaaaattgaaaatatgtgctaggataaaattcaaggtacgtcaactattcaaatatgaaacaatcaggagtgatgtaacatgagtaagctgaggagcacgagacaagccatccaaagaaccctgatgaaaggaaaaaacggcctggacgtatacaacccttttccttggtatgaaaaaatgagacgtgaaagccctatatactttgatgaagaaacgaaggtttggagtgtgtttttatacgatgatgtcaaaaaagtcatcagtgataaagagacgttctcaagccgcatgactgatgtgaaaagctcgattgcaaagtccatgctgaatatggacccgccgaaacatacccaaatcagatctgccgtcaatcgcgctttcactccccgtgtcttgaaggaatgggagccgagaattaaagacattaccgatcatctcctgaaacaggcaaagaacaaagggcggattgatatcgttaaagatctctcttaccctttgccggtcatggtgatttcagaattattaggcgttccgtccgagcgtatggatcagtttaaaaaatggtcggacattctcgtcagcatgccgaaagatgcgagtcctgaagcggcggagaaaaatcagcaggaacgtgaccaatgtgaggcggagctggcggcgttttttgcgggaataatagaaagcaaacgaaaacagcccggccaagatattatttctattttgataaaagaggaagaagagggagagaagctcacgccagaagatctgatcccgttttgcaacctgcttttagtggcgggaaatgaaacaacgactaatctcatttcaaatgcggtttacagcatattagagacgcccggcctttatgaagagctgagacaggacccttctctcatcgcgcaaacagtggaagaaacgctgcgttttcgcgctcccgctccgtttgtcagaaggacggtccggcacgacactgaactgcgcgggcgccgcttgaaaagcggagagatcgttctctgctacgttgcatctgccaaccgtgatgaaaacaaatttgagaaggcgggcgtatttgatatccatcgccaatcgaatccgcacctttccttcggattcggcgtacacttctgcttaggcgctccgcttgccagacttgaagcggaagccgcactgaaaggaattgtaaaagccttttcacaccttgagcccgttcggattgagccgatccgaaacagtgtcatgtacgggctggagtctttagaagccgagataaacgaaaatgagggagaagaaaaaagatgagaaaaacacacatcgccattattaatgtggccgctcacggtcatgtcaatcccacgcttcctgtagccgaggaacttgtcaatcgcggatataaagtgacattcgctacgactgaggaatttgaagcttccgttgccaaaacgggtgccattcccgttttataccgcacaagcataaaggcggacccgaagacgataaaagaacgggtaaacaaaagtgacgcgtttgtgatgtttctggaagaagcggttgaagtgcttccgcagctggaagagctgtacaaagacgaccttcctgacatcgtcctgtttgattttttagcgcttgccggaaaattgtttgcggataatggcggcatcccggccgtaaagttctgcccgagttatgcaatgaatgagtattttcaattaggaagagacgaagaaacgatggaagcggccaaacaggcgatagaagaatatcaggagaaaattgaaaatgaacaagtgaaacggatgacaatggaagaatttttcatgcctgaaaaattgaatatcgtctttatgccaagggcctttcagccgaaacaggaaacctttgatgaacgattctgttttgcgggtccgtctcttggggaacgcacaaatacgggaagtctggaaattgatgcagccgatgaccgtccgcttatgctcatctcactgggaacggcgtttaacgcctggcctgaattttaccggatgtgtattgacgcgtttcgggactcgggctggcgggttattatgtcagtcggcacaacaattgatccggaaagtttttcggatgtgcccgatcactttatcatccgccagcacgttccgcagcttgatgtgctggagaaagcaaagctgttcgtatctcacggcgggatgaacagtacaatggaggcgatgaatgcgggtgttccgctcgttgtcgttccgcaaatgcacgaacaagaggtcaccgcaaagcgtgtggatgaattggggcttggcgtgcatctgccgctgaaagaagtcactgtggcccgtctgcaaaaagacgttcagaacgtatacggcgataaaaacattctcagccgcgtgaaaagcatgcagcagaaaataaaagaaaccggcggtccaaaacaggctgtttgcgccattgaagaatttttgaaaacggcgtccgtcgaaaattgattaggaaaacaggcagcaccggacggctgcctgttttgttatatgtttttcttcatgccgcatctccggcattccctcaaaaattttccgcccttcactgagcttttaaacagcgtgtagtcgcaattgtcacatcggccgctgtgaacatcaggatattcattgaactcataaatgaccgaagtatcgtatccttttgtctcgaactctttttttgtttccatgattgaaagtccctccgcgaatcaaatcgttctgtccggttaatgatacagcaactgcacgggggattcaacgggagcatagcttgattttcccgtctgattgcgtaacaataatagaaataaatgacggcctgccatagggcgcccggcatctgaagggaagaagaaaacagcgatgggaaaaggattgaacgggaaacggattgccatcggcggttcgcggaaaacagaagagatcacaaaattaatagaaaagcagggcggaacggcggtcatccgttccctccaaggaaccgtatacctggcggaggatcaaatggaacccgacgtaagaacatttgccgagcaaaaagccgactgggtgatattcaccacaggcatcggtacggaaacgttattgtcggtatcggaaaaaatcggtctgaaagaagaatttttagcggccattcatgaagcgaaaatcggctgcagaggctataaaacatatgcggccttaaaaaagctcggcatcacgccgcatgcctcagatgaagacggtacaacaagagggctgatccgctccttggaacgatttgactttaaagataaaaaagttatgatacagcttcatggcgaaaaagcgccggttttaacggagttccttgagaaaaacggagcggaggtattccctgttctgccgtatcagcatattccgcctgaaagggagacggtcgataaactgatgggagagctgttaaacggagaggtcgatgccgtatgttttacgacagccattcaagtgcgctctctctttgattatgcaaaagaaaaaggatccgcaaaagaattgcagcaggcattcgaaaaacatgtgcttgccgccgcagtcggcaaagtgacggctgaagcgatccgggatgaaggggtaaagagggtccttgctccggacattgagcggatgggagcgatgataattgaattatcccgttactatgaatctctgaccttgtcataaaccaccattcagcagggaaaaaagcttacgcttccctgctgaatttttttaattgccagtgttccgtgaaaagggaaggatatgtcaaggcgctgagtatgatgcatgtaagaagagcggaggccatcgttgtaaaaacgatcagcagctgaaagcgcaccgcctgtatcggatcagcccccgctaaaatctgccccgtcatcatgccgggaagctgaacgagacccaatgttttctggctttctagcgtcgggatcatactgagtttcatactggacgtcaatatctgccggacggcctgcttaggcgttcctccgagagagagaatcagctggatttcttctttccgcaggtctgcttccgaactgagccggcttaaaaacagacttgagagcaccatggagtttccgatgaccatgccgcttatcggaatgacatatcttgaagtgaacggaatgatgtgaagggtcagtaaaagtccctgcgtcacggtttccgcgattgccagtgtcagaaaaacgcgccaaaatgagccgatccgcatttttttccgtttggcgacattgtgcgaagcggccgtgagcatgagaagcaccattaatatgataaatatcgggtgatcaccgcgaaaaatcagcgacagcacatagccgatgatgagaagctgaatgacggccctgacggttgcgacgatcatatccttttcgacaccggctttaaaagatttagacaggaataaagcgataatgacaaatatacttgttagtaacagtgaaagatcattcatatcagcacccgctcccttgtaaaagcgcccgggctttttcgtgtttcggttccttaaagaacgttttcgtttccgcggtctctaaaagccgtccctcagccataaaccataccgtatcggataatcgttctgcttgttcaaggttatgggtgatccacaggattgtcagctgtttttgccgatggagtttcgtaatcagtttctcaatggtgagaacggatgaggagtcgagcgccgaggtgatttcatccagcagtaggatggacggcagtccggcgagagttcgcgctaatgagagtttctgccgctgacctccggataattctttcgcattccgatccagaagcccgcgcggaaggtctgtaaaatctgcgagctcttcaggggtatagtgctgcgccccgtggagtttttctgcgagcagaaggttgtcccgcaccgtgccctccgtgacgggagctgattgaaatgcaaggcccgcggtttttctgagctccctgatatcccagcgccttatttcttttccgaatacaagcacttccccttcatcaggtgtattcatcagattgcaaagtgacagcaatgtgctttttcccgcgccggaaggccctatcaacgccgtgatagaacctttttggatatgtccggttacacggcttaggacatcaaaggacgtattgttttgttcaaagcgtttgccggctgacagaaaagatattgccggaatttcttctttcatataggatgacacctttcgtaaaaaatcaggaaccggtgagattggctgacgtttgctccgccgttttctggtctgtctgccgggaagcgaatgtatgcatgaccattcccgcaataataatgaacagtccggcaaatgaaagaagtgacggaaacgccgcggataaaaagacgatttcgccgatcagtgcaaaaagaacctctccggactgcgtcgcttcaacagcagcgagcttctgcggctcattcctcaccatatcggtggcgcggaaaaataatactgttgcgataacgcccgagctgagtgcgacgataaaggattggaatgtctgtcccattgagggaagcccgtctctataccagccgaaagcggcgatcaaaagccaaaacggaaggcttgcgagcgtcatgccgagcacccgctgaaacgtatcgagttttccgccgtattgttccagcattttgcggttgccgagcggataggcaaacgccgcgacgacgaccggcgccacgctgaatagtatcgtgcggccggacagagaacccgcatgctgaagctgaatcagcccggctccgatcaggatgatgacggaagtaaccagcgaaatcagcgggatcttttgtctgacggaaaccgggcccgccggtgaattttttgtttcgcagaaaaacggcgacagaagcacacccgcgacaattgtaatctgccacgtgccggcgatcagccagccaggcccatatgccgccgcaaacgtaatcggggcataaaaaagcacgaacccggtaaaactccacttcagccaaaaaaacggttttttccggatttcatgccagagcggcgcccattttcctttcgcataaacgatcaaaaataaaaacggaatcataaaaagaaaacgcagggaagagctccacatccagcttccgccggaaagctccatcgccctgtttaaaataaatgtgactgcaaaaaacagagatgccaatattccgatcacgatggctttcattaaatccctcattttgacacatatttttttatactatactattcaccggcaggcttcgcaatggaatatgagaaaatagcgttttaataaatgatgaatgggaaacagacatatacggaggtgaacacaatgcagaaagaggatattcaagtgctttatttcgaaggtgacggccgcattccgaataacccgaatcttccgcttgttatttataaagcggtatttaatgaagaaacggtacagaaagcagagtccgtcctccgccggcacgattggtctaacagctggacgggcggagtatttccgtatcatcattttcacagcaccacgcacgaagttcttgtcgcggtaaaaggaaccgcggttttgaggttcggcggggaacaaggggcggacgccgttcttcaaacgggagacgcagcggtcattccggcaggcaccggacataaaaaactgtcgggcagttctgattttaccgtgatcggggcttatccgggcggccggcagtacgatacaaaaacggagaaaaatgatagaacttcagaagaaatcagccgtgtcccgctcccggaatgtgacccctttacgggaaaatcgggcccgcttttagaattgtgggaaaaatgacaggggaaaagcggacggtctgtaaaaaaatagcctaaaagaaacgttattacacccccgccatataaataatttcataaacgaaacaattcacgttcaaattttgttcaaaaagtgttattatataagagtaaatcaaattggggttttttatgtttgctattttcagagaggaaaaagaaattttgacttattcaattgtttttgttgatataaaaataatactggatatggcaaagtgaaaaactgggtagtaaacatttatttttgtaaatgattgtgcatgaattcacaatcttgctttttcatgcttttctgcatgaagggggaaaggctaccctttccaaaaaaaatcagcatactgcttatagtaaaggagaatcggatatgccagaaacaatcgatcaaacaaatgcatctgtcagccaaggccaacgcgatcttattgatcagctgctaaaacctgaagttcaagaatcactgactgttttagtggatcagcttccaaaactgactgagttagtaaatattttaacgaagtcttatgattttgcacagtctgtagcgacagacgaagtattgaagagcgatacagtgggtgcgcttacagaaattcttgagccggtgaaagaaacagcgaaagaagttgcggctactgccatcgaagcaaaagaccgcgcggatgcaagcaatgaaacgatcggacttttcggcctgctgcgcatgctgaaagatcctcaagctcaaaagctgttccgttttgctaacagctatcttgaaatcatgaacgaaaaacaaaaataatctcagattcaaattgatataaaggacggaggatatacgatgtcaaaacatattgtcattttaggcgctggttacggcggagttctttctgctttaaccgttcgcaaacattacagtaaagatgaagcacgcgtaaccgttgtgaacaaatacccgactcaccaaatcattacggaactgcaccgccttgcagccggcaacgtgtctgaacaggctgttgctatgccgctggaaaaacttctgaaaggaaaagacgttgacattaaaatcgcagaagtcaattctttctcagttgataagaaagaagttgccctttctgacggttctaagctgacttatgacgcgcttgttgtcggacttggttctgttacggcttatttcggcattcctggactcgaagaaaacagcatggtgctgaaatctgctgctgatgccaacaaagtatacaaacacgtggaagaccgtgtgcgtgaatactctaaaacgaaaaacgaagctgatgcaacgatccttatcggcggcggcggcttaacaggcgtcgagcttgtcggtgagcttgctgacatcatgccgaaccttacgaaaaaatacggcgtagacccgaaagaaatcaaactgaaattagtagaagcaggtccgaaaattcttcctgttcttcctgatgaccttatcgaacgcgcgacaaaaagtcttgaaaaacgcggcgttgagttcttaacaggtcttcctgttacaaatgttgaaggaaacgttattgatctgaaagacggttcaaaagtcgttgccaacacatttgtatggacaggcggcgtacaaggcaacccgttagtcggcgaatccggccttgaagtgaaccgcggccgtgcgacggttaacgatttcttacaatctacttctcacgaagatgtattcgttgtcggagacagcgctgtatactttgcgccggacggccgtccgtacccgccgacagcgcaaatcgcttggcagatgggtgaacttgtcggttacaacctgttcgcttacttagaaggaaaaacgcttgaaacattcaagcctgtaaactctggtacgcttgcaagcctcggacgtaaagacgcggttgccatcatcggagcgaactctactccgctgaaaggccttccggcatctttaatgaaagaagcaagtaacgtacgttatttaacacatatcaaaggattattcagcctcgcttactaatccttaagatcatacagaagacattgccggacttttctcggcaatgtcttttttttgcataaaaatgttaatagatacaattttctgaaaaataaaataaaaatgattgatatgtgagaaagaggaagctaaaataaaaaagaaccattttgttaacgttaacattttttaagagggaggatgagagtgtgaaagcttttatgggtgatgactttttactggatagtaaaacggccgtaatgctgtaccgggaatacgctgaaaacatgccgatcattgattatcactgtcacttaagcccaaaggaaatctatgaaaataaaaccttcacaaccattacggaggcatggctttacggtgatcactacaagtggcggatcatgagggccaacggcattgaagagcgctgcattaccggaaacgcttcagatgaagagaagtttttcgcctgggcaaaaacggtgccgatggcgataggcaatccgctgtacagctggacgcatttagagctgcagcgctggttcggcatttatgacgtattgaatgaaaaaacggccgcggcaatttggaaaaatacgaatgagctcctgcagggagacgggtttggcgcaagggatctcattctgaaatcaaatgtcaaagtcatttgcacaaccgatgatcctgccgatgcgctgacataccatgaaatgttgaaagaaagtgattttccggttcaagtgctgcccggatttcggcctgacaaaggtctggacatcagcagcccgggttttgccgattgggtccggtcgctggagagcgcttccggaatggctgtcaccacctaccaatcgtatttggatgcgttggaatcccgcgtccgcttttttcacaatgccgggggaagagtgtcggatcacgcattagatcaaatggtttatgccgagacgaccgaagaggaagcggcccggatttttgccgccggattaagcggagagcatgtgtcttttgaagatgaaaagaaattcaaaacacggacgctgcaatatctttgcggtctttacgccgaactggactgggcgatgcagttccatattaacgcgttaagaaataccaatacaaataagttcagcagcctcggtcctgatacgggatatgactcgattaatgatgaatgtatcgcaaaaccgcttgcccggctgttagattccgccgaaaaaaagtggcaattgcctaaaacgattttgtattctctgaatccgaatgacaactatattatcgccagcatgatcaacagctttcaggatgggaaaacaccggggaaaattcaattcggcacagcctggtggttcaatgacacgaaagatggaatgcttcaacaaatgaaagcgttatcaaacacaggcctgttcagccggtttatcgggatgctgacggattcaagaagtttcctgtcctatccccgccatgaatacttcaggcggcttgtctgcacgctgatcggcggctgggcggaacaaggcgaagcgccctgcgatatggagcttttagggaggattgtcgagggaatttgttaccggaatgctgaggaatatttccgcttttaaaaaatggaatgaaagaggtggcctatgagtaatgtgcctgtcgtgacagcacctgccgcaaaagtgaaggagcataagctgagtctgaaagaaaaagtatcctatggtttcggagattttgggaacggatttatgtttgatctcgggcagatctatttgctgaagtttttcacagatgtcgcaggcattccggcagcgttcgccggcagtatttttttggtcagcaagctgtttgcggctttgactgatccgattgtcggctcggccattgactacagaaaaaagatcggaccccgggggaaattcaggccgtacttattattcggaagtattattcttgcggtcatgaccgtattgatttttgtgtcaccggacgtgagtgtcacctggaagcttgtgtacgcctatgcttcttacatgctgtggggggtcgcttattctttcgtcaatattccgtacggctccctcggtgcagccattacacaggatgcggaggacagaacggcgctttccgcattccgccagatcggctctctcggcgcgctgctcattacaagtgtcatcgtcatcccgattctcgttcattttgataacgttcacatcggctacccggcagtcatgggaatgatggccgtaatcggaatcgcgggatttatgatctgctaccgaaactgcaaagaaagaattatcgtccgtgaagcgccgaaagaaaagctgtccgtcatgtcggttttcaaatgctttatcggcaacaaaccgcttctgactgtcgttttcatgacgattttctcaatatcggcatacaacattaaatccgctatgcttgtttacttcgcccaatacaatctcaacaatgcggagctgatgtcctacatgagttttatcatcatcggctcttcatttttaggtgtgttgtttatgccgaaactcgtcaaacgcttcggaaaaaagcaaacggtgatgatcggttttgccgtcagcgccgcggctgatgcgctgaatttctgtctcccgtcaaatgtatatatctttacggcgttagcgagcattgcttttatcgggatcagtataccaaacggcattacgtgggcgcttgtgtcggacattattgattacggagagtggaagacgggtgaacggaaggaggcgacgacatattcgcttttcaacttctccagaaaactcgcccaatctttatcaggttttctttcaggcatcgggctgagcgttatcggctatatcccgaatgcgtctcagacaaaaggcacgttaatcgggattaaagggcttctgctgctgtacccggctttcgctttagcgtgcgccatgctgattatcggtttaatgtataaactgacggaccggcagcatgacgagctcgttcaggacttacatcatgcaaaacctcaactttagtgattttatggactgtccgttaatggtacaatagaaataaatgacagcatacagaaagaaaggaaaaacgatggtaaccataaaagatatcgcaaaactcgccaacgtatcccacacaaccgtatcccgggcacttaacggcagcccctacattaaagagcatacaaaacagaaaatattagagctcgcttcacagctgaattacacaccgaatgtaaatgcaaaaagccttgccatgcaaaagtcccatacgatcggactgttttttacaagcatcacaaacggaacctcacacagctttttttccgataccatcaaaggtgtaaaccgcacaatcagtgaggaatacaatttgttcgtccgcgcgattgacgatctgaaaagctttgaaaccattacgcccatgagatatgacggaatcattttaatgagccaaagcgacagtgataattcatttatttatcatatccgcgagaaaaacatcccgctcgtcgtgctgaaccgggacattgatgaccggagcatcacgaatatcctgtcaaacgataaagaaggctccagacaggcggtcgactgcctgatcgcaaacggacacagagatatcgcgatcattgagggaaaggaaggattcaggtcagcttctcagcggaaagaaggctatttgacatctttaattgatcattctatcccgattaagcatgaatacagtgtaaaaggccgctatgatatggaaagcggcagtcaggcgatggaaaaacttttggcgcttcaatcaccgcctacggctgttttttgttcaaacgatgatatggcgatcggggcgatgaataccattttcgccaaaggcctgaacgttccggaagatatttccgttatcgggtttgatgacatcggcatttcccaatacatgacgccgaggctttcgacagtaaaacgcccggttgaaaaaatcagcatactcggcgcagagaaaattttggcgcttatcaccgacccggatacggcggcggaaaaaatatacgaaaacaccgaggtgatgataagagattcaattaaaaaactcacataacggcccgtctgattatccgggtttttgtacgggagaatgttaacgtgtgcataaatataaggaggcggacagcttgcggcagctgaataaaaagatgtgcggaaaatacattcaatatcctgaaaaagtccttcagttcggcgaaggcaactttttgcgggccttcgctgactggcagatcgatcaattgaatcaattgacggattttaacggaagcgttgtcgccgtacagccgagaggctctgagaaaataaaacgtttaaacgaacaggacggtttgtttacgctttttttgcgggggataaaggacggaaaaccggctgaagaacacacgatcgtcaaatccatcagccgcggcattgatcttttttctgactatgattcctttaaacggctggcagcacaagaggatcttcgttttatcatctccaatacgacagaagcgggaatcacgtttgagaaaggcgaccggcttgaggataggcctcaaaaaacattccccgggaaattagcggcgttcctttatttccgctataaggcatttgcgggtgacgccgagaaagggtgcattgtgcttccatgtgaactggtcgaagaaaacggacggaaactgaaggctgccgtgcttcaatatgccgggctgtgggagctggagcctgattttactcaatggattcatgatgcgaacatcttctgcaataccctcgtggatcggattgttccgggatttcctgttgataccgcggaagaacttaccgattttctcggatacgaagaccgtctgcttgtggtcggtgagcattattatttgtgggtgatagaagggccggaacagcttcagaatgagcttccttttgctgatgccgggctgaacgcactgatcacgtctgaccttacgccttacaggacaaaaaaggtgagaatcttaaacggcgctcatacggcattggcgccagtggctttattatacggactgctaaccgtccgggaagcggctgagcacgaggtgacgggcagattcatcgaagagctgatcaatgaagaaatccttcccgtgctgcaaatggagggtgtcacccagtatgcggcagatgtgttacaccggtttaaaaacccttatatccaacattatctgcaaagcatcacccttaacgccgccgcgaaattcaaaacaagaaacctgccgacgctgaaggcttatatcgaacaggagggccggcttcctgagaggctggtattttcattcagcgccatgatctattcatactggaacgggctgaacaaaccggcagatggcgaggaggttctgaaccgttttcaaatggcgcggtcccgttgcaaagatgatatgtttcaagcggcattttctatattaggagaagagcgattgtggggaaagaatctgaaccatcttccggggctgactgaacgaacggctttttttctctctgtcattcataagcgggggatgaagcatgcgttacatgaatgctgcggcaataaggggggaagtgaaatgaaagaggtcataaaaatccataaaaacgataacgtgcttctcgctatgcgccattttaacaaaggggagcggctgtatacagacggactggcgattgaagtgaaggaccctgtaaagcgggggcataaaatcgcgctgcaaaccattgaagaaaacggcagcatcattaaatacggtttttcaatcgggcgtgcgacaaggcggatttcggccggcgagcatattcatacccataatctgcaaacgaatttatccgatgtgcaagaatacacgtattcaccgcgcttcgaggacaatccttttacaaatgagaaccggacatttaaaggctacaaaagagaaaacggtacatccggcgtccggaatgaactgtggatcgtgcctacagtcggctgcgtaaacggcgtcgctgagaaaatcctgcagcgcttcgtaaaagaggcgaaagacattgccccctttgacaatgtgctggttttaaagcaccaatacggctgctcccagcttggcgatgatcatgagaatacgaaacaaatgctgattaacgccattcgccatccaaatgcgggcggtgtgctggttttagggctaggctgtgaaaataatgagctggcggcaattaaggaaacgctttctgaagtgaacggagatcgggtgaaatttctcgaatcacaggctgtcacagatgaaattgaagcggggacagcgcttcttaaagagatacaccttgcggcaaagggagataaacgtgaggagattcccctgtcagaattgagcatcggattgaaatgcggcgggtcggacggtttttccggcatcaccgcaaaccctttattaggaagattttcagattacttgattgcacagggagggagtacggtcttaacggaggtgcctgagatgttcggcgctgagacgattctcatgcagcgtgcggtgagtgaagaagtgtttcataaaacagtccgattgatcaatgatttcaagcaatattttatgaagcacgagcagccgatttatgaaaacccgtcaccagggaataaggaaggcggcatttcaacgctcgaagacaagtcgctcggctgcacccaaaaagccggtcttgcaccggtttctgatgtgctgacatacggtgaaacactgaaaacaaagggattgacactgctcagtgcgcccggcaatgatttaatcgcttcttcagcgctcgctgcggcgggctgtcacatcgtgttgtttacaaccggaagaggcacgccgttcggcacatttgtcccgactgtgaaagtatcaacaaataccgatttatttcaatcaaaacctcattggattgattacaatgcgggcagattggcggaagaccaaacaacagaagatcacattgtgagagattttattcaatacattattaaagttgcaagcggagaatacgtcaataacgaaaaaaacgattttcgggagcttgcaatctttaagtccggtgtgacgttataagggaaaaggcgatctgacaacagaccgccttttcgcattcacttatcgttttgccccttgatgaattgtgaatatctatgagctataataatggaatggtgccttacataaaggagatttttataatatatataattattatggaagattggtttttagtcacatatttcagagggggtcctaatgaataacattttatacattgaagatgaccaagaaattggccaatttgtaaaggatgatttagaagatcggggctatatgattatatggctcacttcttcctataattacgaaacatatatagaaaaggctgatctgatcgtgcttgatataatgatgcccggtttagatggatttacaatcggtcaaaggatgaaaaaaacacatccgcagatcccgctcttgcttttaacagcgagaacgggtctggaagataaactgaaaggcttaggatttgcggatgattacgtgacaaaaccctttcatcccgatgaactggccgctcgaatcgaagtattattaagaagatttgacaagactgccattcatgaattgaagctaaaacacttaagtgtccacttgaaagaaaaaagaattttaaatcatcaaagtcatgaggaaatatttttaactgataagcagttaaggatttttttgcttttgcttagacatcccaatcaaatattaacaaaggaacaaatttatgaaaatatttgggagcagccttatatcgaaggggataagacgttgatggtacatatcaggcatttacggcaaaaaatcgagatcaatccaaatgagccggaaattcttgaaacgatcagagggattggatacaggattaaacaatgaaattatcaacaaaataccttattaatatcgttgcctcaattttgttttttccgatagcctttttaggtgtgaattttctttactatgtcacattaacatacttgattgatcaccaggggcaagtacactatgaaccaaacaagttggaaagtgattggaagtctgatgtggaaggtttttcagggaaatccaatcgggaaattacgtctgctttcccgcacatgaagcaatataaacactctgatattgtatggataaatgataagggaaaggtgatgttttcgaactcagaacggttggccaaaaagggtgaggttattcacgttagcgaattgattaaattgatggaacaaaaccaaaagaaatatttattgctgagtgcttatgtaaatgggagtgaagacagcggatatgcatttttagaaactccgcgctcaattataggatctcaatgggaggttatgagggccaagtattcctatatatggtttatcgccttgatttttgtctgttcactttttgtgattaattcatggatgttttttgcgaaaatacaaaaaaggttaatttctttggggaatcatatgaaaaaacaagataatgacggcataccggaatttgtaacagttaaacagaaggatgaactgggtcaagtggaatattcattcaaccagatggttgaggaactaaggaacagcagacaaaaagagcgtgaagaaggcgaaatccgaaaaaacttgattgctgatttatctcatgatttaaggacccctcttacggttataagagggcatacatttacgttgaagaatgaaataagcagtgaaaatggaaagcattctttaggcatcataaacgataaaataacgtttatgggcgaactgattgacaatttgtcatcattttctcttcttgccgcaggtaaattgccgcttcataaaaagagttgtgacatattaaagataatacgttcttcgttaacagcttggtatccaatttttgagaaagagcacttcacaatagatattgatctgaaggaaaacatcgtatgggaaatagacgagacttggctgaagagaattcttgataacatttttcaaaatgttttgcgccatgctcattcaggaaaatacgtttccgtacagacaaagctaattgaaaacaaacccgtaatcataattgaggataggggcccgggaatgaattataaatctgaaagaaaaggcgccgggatcggcttatcgatcattaatatgatgcttaaacaaatggggcttgaacataaaataaagagcaatcaaaacggaacggtttttattatttatccaaacagcaatgaatacgtgaagccgtagaggcttcacgtattttttatattgagaaatttaaacgtaaattaaccttgactatatcttctttttaacctcgtaagtttatattataaacagaacaagacggagaggaatgatgaaaagtgggaaaggctgatccagctttaatatccaagggtatcaatgtttctataaaaaagaaagaaattttacatgatataaatttaacattggaaaaaggtaaaatatatggtttattaggtcccaacggtgcaggaaaaacgacattgcttaaagttctgttagggatatttcctccaacttcaggtgaagtgatttttgagggggatgacttatatggaaatccaaataatgatgtgattcagtctataggaagcattatagaatttcctggcttttatgaaaatttgaatctttttgagaatattaaattacatcttaactatttaaaaaaatcagcttctgatgaagaaataaatgagattttaggaaaggttggactttttgaacataaagataagctgttttcgcaaacttcattaggaatgaaacagaggctgggaattgccagagcagttgcgcatgctcctgcattgcttttgctggatgagccgacgaacggtttagatccatatggtattaaagaagtacgtgaaatgttgatccaagaggtaatgaaaaatggaaccacagtcgttatttcaagtcaccttttaagtgagattaatctcatggccgatgaattgcttattatgaataaggggcagattattttcgagtcagcctttatgaaaaatacgcaacatctttatttgtacaaaattccagctgaagcgggtattaattgggcggatattgagaaatttgcggatcatgttatttcaaagaataaacagcaattcgagtttatttcaataattcatccgtcggaaatgaaagagaaattaaattcttggggatttaacaaggcgtctattgacggatttaagctatctttggaagatctttatttaaaactgctggcaaaggagaaaggtcatgagtctgttagtgcgtaacgagtttctgaaacttaaaagactgaaatcaatttatgttattttctttctaagctttttgccatttctcataaacggaatcggtcttttgactatgaacgaaaatacagattggaacaaattttatatgtttgtttttaatcagtattcgatcctatttccgactattatttttattttttcaggtttttatttttatttagaatttaaaaacaggacaatgttgaattggatgtcatatccgtatcataaattcaaattgatattatcaaagctagctgcagcttttctatttttgtttttaatctcagctgttaatcatattattcacttatccaccttgtttttcttttttcgggaagatatctcagcaagcgacttattaagattaatagcgacatcttttacttctactactttgagcctgctaaccattccgattgcagctttaattgctttcttaagtaaaaatctagtggttgtcatgataaccggtgtagcttcctttttaataatgacgatactgttagcaagtgatgtctcaatagtctttcctttttcttttatttatcgtttcagtattcaaatttctgaaagtgatatgggatataccaattcaattcttttagtttggggattactgattatggggctgtatgttttggtatccttatcaggattatacgtatattcgaaaaaaaacagaatgtaaatggaggatgagtatacatggagcaagttatttttgtgatttcaatgctcgctttaggagttacactggttacctttttcggaatgattttgaatgacggattaagaggcgtactaaacttttcaagaaaacctgtaaaatttatgactggatcatttctggtatacattgttgcctttgctgtttatattttaataagtgtaaagtaactttttcattttaaggggattcaaagggattcccttattttccttagtaaggggcttggatacaaatgaaagataattgggtgaagcttaatattgagcagtttgcaagggcttttgttttctccttattattgttttttatgcttttgcttataacagacagccaattacagtttaaacagtatagtctattttttgttctaagtatattcggcagtagttgtttatgctttacctatgatgacagaaataagacatatcttcgcagcctgttccgtttttcagaattatgtcaaaagggatccgatgcagatcaattgataaaagaactaaccaatgaaatacagagtgtgctctcaggaaagcagattgctcttataaactatgacaaaaaaacattaaaattgagagaaaaaaacattcaagttcctaacataaacatttcaaattttaagataggagaaatacgtgaaaccgccagcggatcaattctgtttatcggggagaagtgtgatacatttgtttttattcatttatcacatgaaggacaccctataaagattcgtgaaaacgaggcagattggctgcgaatgctggcattctgcacagcatctgcacttcagaacaaattattgattcaaaaaaaaattgatgaaattatcatagacgatcaacataaatgtaagtcggctgtactttctaaggttttattttcaatttcagaaatagagagaaccaagcttgcacaggatattcatgactctatcattcaagagctgatatttgtatgcagagaattagagtatcatgttgagaaatacaaggatatttattacataagagaaattttgctggacaatatccagtatataagagaaaaatgttttgatttaagaccaccttttttaatggagatgggacttcttcgaagcattcaagtcctgattgataaacataaaagcaactatcagcttgatattgaattctttgtagatgtaaaagatgattctatttttacagaagatatcacaataaacatttaccggattgttcaagaactgcttactaatgctgtaaaacattcaaaagccagttatattgttttgacgatgattcaaaaaaaaacaagtcttatgtttgtttacgaagataatggaatcggcattgattggaataaagtaaattcaaaaacaaacagttttgggctgacagggataaaagagcggataaattgtatgaatggtattcataatatatcttcaagcgtaaatgaaggattgctgttaaggtttgaaataagtacgaaaaatgaatagggagcgctgacatgataaagattctattaattgatgatcatattggtgttgctcaagggacaaaagccattcttgaaaaaagcaataaaatgggagtaacaatattgtcttgctgtaaagaagtacttaatcaccttaagcattatgagtatgacttaattttacttgatttatatatgccggagttaaatggaatggaattgtcaaaaatgattcttagagagagccccgatcaaaaaattataatttatactggttttgatatctctgtgcatttcaatcttttggttgaagttggtgtttccgggttcataagtaagtcatcaacagaagaacatatgataaaagtaattgaaagtgtcattgagggagataccattattcctactcatctctttaaacaattaagaagaacagaagcaaatacgttcaacattgataagcttgaagatagaataagagatattactttaaatgaaagagaacaagatatcttagcgggcgtagcggagggaatgacaaaccgggaattatcagcaaagctgttgatcagtcaaagagcggttgaatacattcttactggtgtgtacaacaagctcggagtaaaatccagaacagaggcactgatcaaagcaaatcgatattcattaatttctatgaaaactatatatgagtaaatgaatcgggattaacggaacagttaatcccgattttctttataacctatacttcggaaacgcgcaaaaaaaaagcgcttttccgaatatgacttttcggtgcctataggtaaaagatcgtttatcataggtttatagaaatatatggatcaaaatccaatatatttcaaaaatcaaggggaggaatattaatgaatgagaaaatgtatcgttttgccggtgatttaagagaagaacttgaggaaatttctttaagtgaattcagcggaggaggaggcgcagaacagcgagggatttctcaaggaaatgatggtaagctttgtacgttaacttgggaatgcggtctttgtcctactcacacttgctggtgttaaaacaacccgaaataagaaaatagatttccaatgctctgggagatccagctgtctccctctttttttaaaggagatgaatattaaatgaattcgctaactaatattctattaagtaaagaaaaaaaagctgctgtctctcaatttgatgaaaatgagaaactgtttgatcgaaacttagaactaatctataagaatgatattcaaatggcccaggaaagcatttataatgtgttatccattcaatcaattgataaagtgaaaagcttatatcaaaccccactacataaatccgcttttacagttcatgttttcgaaaacctaaaaaaagggatcgctcaccaagctattaaaaaagaagacgtaaatgaagaaatcatgtttcacgtttttgcgttaaaagtgtcctcttacttcaatgatctacttaaaaaatcaaagtttccttcttatgactatctgctggaacaaccggctctttttcatcatagtatttcaaatcaattagaaaaaatcattttaaaagtatcctatagaacacttgtattggatatgaatatgaatcgggaaaaaggttttttggcaggggagactcctaaagaaaaatatggtgattataataaaactcttttgtgcagtcaggagtatcttgaaaactttttccaacgatatccagtcttattaagagcgattggaaatgaactgagaaaattcaaaaaattcatactggaatttatctcccgttttgaaaaggacaagcctgaactgctctctttatttggtttttcagaacaagtcaaaataagggacattgaagtagggatgggtgattctcattctgatgggagaaaggttactaaaataacattaaatgaaggtaaacttatttataagccgagaagtttagaaattgatctattatataaaaagataattgaatttttgaatgagaaaattagagatcatgatataaaattgagcactccgaatgtccttagcagagacggatatggatggactgaatttatatcttttaaagcatgcaattgtttaaaagatgttcaaaacttttatcagcgtacaggagctcaaatcggtttgttatatgcattgaaagctgttgattttcattcggaaaatctcattgccaacggcagctatccagttctcattgatttggaatccttatttcatcctgcataccagaaaaaaaaggatgggatggacgcttatgaaaaagctgaaacgcagcttcatgaatctgtcagagcattagggctgcttccttttttctttgcgggcaaagccgacatcagcggaataggtcggaaagggaaagcaaagtcgatcattaaagttcctcagcttatcaatttaaagacagcagaaatgtctgtcaaacgagactatgtcgaaattgatacagctaataatcaccctatgcttgagaataaatttgtatatgcaaaagattatgtcgaagaactgaagcaaggtttttcaaaagcatatatgactatattaaaacatgcttcggagctgattcgcataatagaaaagagcgaaaacaagatatatgttcggtttatatcaaaaccgacaataaagtattctgctttattagaattaagttttcatcctagatttttacacaactctattgatagagaaattttcttatcaaaaatatgggagagaccaaagcaagaagatgaatatcaatctattgttaaatatgagttcaacgatttaattaataatgatataccttatttcaaagtgaaattgaatgagaaagacttactaagctcaaaaaataagaaaattgaaaattactttccggaaacaccagctcaaagtgtaaaagaaagaatttcaaatttatcaaaagacgatttaaagtttcagctctatgttatcgaactgtcaatgcttgcttcggaggatgatcggcaaattgttttgaaagaatttataacaaaagaaccaggacaatatgtaaatgttttcagtagtaaccaagaaagtatcttaatagaaaaagcagaggaattggccgcttatatttataatcaatcttacaaagcacacacagataaaggaagttcgtattcttggcttaacgctactcctattggagttgatgaaattcaatggaacttatccgttatgggtgataccttttacgacgggctttccgggatggctttcacctacctggctttatggcgcgtcacgaaaaaagaaaagtatctggacattgccgaaaaaattatgaaagatgtcatctctcgttttattgatattgaggtgaaaccggacgaagacagcagtatgtctgtaggtgctttttccggagtgtcttcaatagtatatactttaatgaatttctatatgtatactaaacgcgaaaaatataaacagaatgcaaaacaaatcgctcagcttattccgtccttgcttccttatgataaagaattggatataatcgggggcacagcaggggctcttattgtaatgatacgttcgtttgaaatagagaatgatacattctttttatcattggctgaacaatgcggttcatttttaatgaaacaagcgatctttcttgatgaggattttgtcacttgggaaggtattgcaaataagccgttaacgggtttttcccatggaaacgctggaatgatatatgcccttcaattactcgagaaacattcaaaacatcaagatataagtatgtacatccgaaaaggacttgcttttgaaaattcaaaaaaagtaaacggtaactggcttgatctgagaaaaacggtaaatgaagctgcaacatctgcatggtgccatggatcccctggaattctattaagcagattagaattgaaagattcaaaacaccctgatattgccgaagtggccaaaaaagatctgaataaaaccgtttctaacattttttatgacggttttggccgagagcaaagtctttgtcacggagacatgggaaatgctttaatactgatcgaatatggaaaaaagactggtgaaagtcaatttgtaaatataggaaaaaacttgattttggagagtgtacaagacaaaaatataggtttctaccaatgcggagttggaagggatgttgaaacacctaatttaatgcttggtttagcggggatcgtatatggaatgctgtatgcagcagacgcagaattgccgaatattctcaatcttgaaataggacgtgtagatacattaggagacatttatgaaaattagaaaaagaaagcttccggttattcttcaaagaaatcaatttgattgcggtattacttgtttagccatggttttgagcagggctgagggaataaaaatcaatcctaacaaattgaaattaaataaagaaattatcggaagagacggcactgatttaatagaaatgaaaaggatttctgaaacattcgattatgatttcaaagcattccgcacagacaatataacgcagcttaaagagttaaataaaaaccatccgctaattgttcattggaatcataatcattttgtagttgtcgacgcatttggcacagataacgttaaaattatagacccttcgtctggcagactgacaatcacattagaagagttcaaaaccttctataatggcatttctattatgttaatcagaaagaacgaacttgagagaaaggataagactgcttcgtcgttaaaagatgtgtcttcatttagaaagatcggaaaatatcttttgaaagataaaaaattgttgggggttattataagtttcacttttatttttcaagcattaaacttaatgaccccttttttgactcaatatattattgattcatttattgacggaaatgagaaaattcttcccataccaatgcttttcatgattgtaattgtttcaatcgtattattctttagtctgtccttaatcagaatgaaatttattatcaaactgcaattaaaaattaataagagtatgactgataaaataattcataaaatatttagtcttccattaaagttttttgaggcgaatactgccggggatatttcaactagaatccataacattgctgtaattcgtgaagtcatttccaggttagcgtctactttgatattagatatcagtcttatatttgtatttttcatagtcatgtttgtttattctccgatattatcttttatagttttattgggagcagctatacaggtgatgagtactaaaattttgcttccgaaaattgaaatgttcacaaaacaggaagtaaatagtcaatccaattttcagagccagctaatcgaaatcttaagatcaatgacatttataaaaacaataggagaaaccaggaatattgagagccaattaaattataactttaatcatcagttagattatttctctaaaagaatgaattattcatctttactgggtgcggtctccaatgcaatcaatctatctttgccattacttattttaattgtgggtacttggtcagcagtatctataggccttacgctaggcgcagtaattgctttttctaacattgccggacggtttatgtctccgctgggatcaattatcggcagtttagagtctattaaattagttgaagaaatggtagacagggttgaggctgtactggatgaaaaagatgaggaagtaaatgataaaagcattgaactatttaacccggccgctcataatatcagcttgaaaaatattgatttcagctacaacggaaacgattatattttgaataatataaatttaatgatccggccgagagaaaaaatcacattaattggaaaaactggaagcggaaagtctactttgattaaaatcattgccggcctttatcaaaaaacagcaggagaaatttgctacggtgaattcaaaatcgaggacgttaatatggttaagctgagagaaacgttaggttatattgttcaagatgtcaatctgtttaatgacactattataaataatataaaatatttcaatgaaaaaataacaatggaagaagttgtacaagctgcaaaagaagcatgtattcatgaggatattataaaaatgcctatggggtatcataccatgattggagaaaatggtattaccttatcaggtggacagcggcagagaatctcaatagccagagtattagcgaaaaatccgcgaattctatttatagatgaaggaacaagcaatttggataaggatacagaattaaatatattaaataacatttacaaaaaggatatcactgtaatttctattactcatagaaccgaatggctcgaattctccgaatctgtctacgagattgaaaatggaaacttaaagacgattaagaccaaatatgaatcacagctccagcagacttattaacttgaaaggaggtgaaatatggaatatgaaagagaacttcagcgcgttgtatgaaacatcagagcaagaattaagagagcttattggagggcaaaactcagtatcaataacaacaattccaataacaaatcatgtttgtccaactatcacagtaggctgcgcatgtccgcaaaggcaagtataaaaaacaatcggggggatttttaatgaaaaaagaatttttagcattggaactaatgactgaggaagaattaaaagaattggcgggggctcggaggcaactccaatgactgtaacaccgacaaccatcacaataccaatctctttagcaggctgtccgacaactaaatgtgcgtctattgtcagtccatgtaacgactgaaatttataaaaaactcaaacaataggaggaattaacatgaaaaaagattttcaagcactgactccaatgactgaagaagaattaaaaaaccttgcagggggttcagatgcaaccccgatgaccgtaacgccgacaaccatcacaataccaatctctttagcaggctgtccgacgacaaagtgtgcgtccattgtcagtccatgtaacgattaaacatatccgaaaaagaatatgtatatgcgtacatattctttttcttttttgtcaaagacagtcaagaatatataaggaagtgataattgtgaacaaaacacagaattcggctaactatgtttatgaaaactctatgttgaatatttttaaagaagaggattatttcgaaggttttgcgcagtattatataagtatttttaaagctcagattgttaaagaaatagatagaataccatccgaaagtctgttggataagggatgtcttgttgaatcgatattaattaattataagaaaaaaatatactatttggcggggaaaacacttatccatgagtttcatcaaacttttgacgagtttgatgaaaaaaatgaatctaaaaattatgatatattctcagaaaggctgaaaaactccgcatttgttgaagaaatactcaataattatcctgtattgcaagatttaatctccagatccacctctgattttatacgcttcactatatctattattaaacattgggttaatgactataaaaaaatccaacaaaaattcaacttttcgttcggaaaaatgagaaaggttaatatgaatgcaggggatgttcataatggcggtaaaagtgttgttattattgaatttgagaataacaaactcgtttataaaccccgttcacttgaaattgatgttttttatgaaaaggtcattgattatgtcaatcagtattatcaaactaatttaaaaacacctttatccttggatcaaggtgagtacgggtggcaagagtatgtacagtctgaaccgtgcgataatattgaacaggtaagaaattattattaccaatttggaatgcatttaggatttatttatgcttttcaagggtcagattttcattttgaaaatatcatagcatgtcgtgataaaccagtgttggttgatcttgagactctgtttcaaagcagcctctttttttctgaggagaacaaggaaaatgttaatttaatggcatcagcacaggtaaataaaacaatattaaaatctgcactttttaactatatgagttttccggaagataatgggctgactaatataggaggcttgataaacacagaaaatcaaaaaggtgaaaaagaagaagtgcttcatataaaaacagataaaatttctataagaaagaaacaatatctcttcaaaaggggaaggaatcttcctgtttacaaaaataaagtagcagaatgttttgaatttgaaagagaatttattgaaggcttcaaaagaatattcttgattttgaaagaagatttatatatacggaaccttataagcgaattaaattatgcccctattagaattattgtcagacctacatatgtttacgcttcatttcttgaaaccctcctccatcctatgtatttaaaagattatggagaaaggataagggttttatcttttattaaggatgcttatacaaaatatgaagtatttgattccatcagtccatttgagatcaaggatatgatgatcggtgatataccctattttaatgctcctattagtgaaaaaagggtttattcaaattcaatacatgtggtggatacagggattatgaaacaaagcgctaaacaagaagttttaactcgtttagcgaatatgtcggaagaagacatgcatcagcaagtgagcttgataaatatggccttaagctccacggcggctaatttggatattatttataaaaatcaaattgatgattttgtacctggatatttaaaaaatgacatacaaatcaaagagctgattcaaatagaaacagattgtatattaaaacaagcaatcgaatcggagaaatatcttcaatgggtatcaatagtctcggctcccaatggcaccttatccgtaggaccgttgagttttgggctgtacgatgggttagctggagtggggctttatttttcagcttatgattttatttataatgatgaaaaagtcaaatcgattcttcgtaaaatagtgaattcaattaatcaaatatatgagcatagtatttataaaacaaatttctctgctttttacgggtcaagttcttatatctattttgtcaataaaatgagaggtaccggactttattcggaaaatgaagtgaatagtatgtgtaaagcatacttagagaaacttcgtcaggaaaccgctcaaataacacataccgattttataggcggactcgcaggtatattaaaggttgtgattcagcttggcaggtattatcggactgaattaatggaagatacggcaagggcagtttgtaaagaaatatgcaaaagaatgattcaaaatagaaatgaagcatattggaaatccgacgcggatgagaatgttgttttagcagggttttctcacggtattactgggatttgttatgcactatctgaatattatgcgcatattgaggcatctggagaagtacttagactgattgaatcagctctcaaatacgaagataaattttttgatactaaaataaaaaaatggagggataacagaaaaaatgagtcggattattcttccgcaatgtggtgtcacgggtcttgcggtattcttcttggaagaagcaggatatacgagaatgtagacgggcgcattcacgttgggtatattaatgagtctttagatgacacattgctgaatggaaattcccatcgtcagggctactcattatgccatggaacgatggggaatatagatgtacttcacgctattaaggaattatctctctttaaaaatcgcaagcaagagattgagaatacaattaatatatgggttaaccattttaaagagaccctgttgaaaaatggctggcaaaatggaataagaaatgatcattcgggacttggtatgatgttagggaaaaccggacaattatatgcacttttaaggttagttaataaagaaattcccaccccattggctttggattgagggggatttcccaaataaaaaagcgatcctgtaaaggacgctttttttagattaattttatcccgctgattaaaataatcgccgccatcacaaactgcagcgggcgcggtgagaatttcggcgaaaagaagctgccgagaagcacacccggcacagagccgatcaacagattcaatacaagcaggtaatcgacgcttccgaagcttgcgtttaacagaccggcaacagttacgagcaaaaaggcatgtgcgatatccgttcccaccacttctgctgttttcattctgaacaggtataacatggcgatcgcaaataatgagccggacccaatagatgtcaggccgacgatgaagccgaaaatgacgccgatcagtatcatgagtgtccgcttttcttcaagtgttttttgctgccagcggttcggccgcagttttttatcgaaaaaaaggcgggcgataatggaaatggcgacaagggtcagcacgtagccgagcgcctgtttgataatctgctcctgatgctggtgaaaagcgggaaacaagtgaagaataccgatggcggctgttgcgctgggaatgctcccgagcgccaagtagccgacaagtttaaattgaacggtgcgctgcttccaatgagaaacgacaccgaacagtttggtgatggaattatataaaaggtcagtgccgacggcgattgaggggttgatccccaaaacgatcagtaaaggagtcaaaagcgccgctccccccacacccgtcaatccgaccagcgttccgacaaagaaacccataaacacaatgcttacagtcatctgtgtgcctcctgaataatcctactatttttatcagattatatatgattaagaggcggtaatcaattaaattttcggaaaattttatacagaacaaaaaatccgcctgcctgctgttatttcgcagatcggcggatgatggccggattatgatttttgctgataaaacggaagttccgtgtggcccatttctctgacatacacgaaaagattgcctttatgatgaatttcatgctccatggcaagctgaaggagagccgcgccggttatttttctgccgaaagaggcagtcaggtcaatttcgcggttcagctgctcttcagtcagctgtgacaggatgtctgtcgttttttcagtacatgcttcagccagtttgacgaggtctgtttccgcttcttctttcggtttgttctggatagctgacccgtttccgtcgttaatgacgtttgcaaacataagaaaagaataaacgatgtgttttacaagttcctgagcggacattgatgtctccgccggcttgtagtcgtaatgctcgcggctgattttttccgccagctcaatcgtcacgtttcgatgtgacagaaagtggctgaccaattgattttgtgctgtcatgtgaaaacccccatttaatacagaataaaagctgcaaggatatgctatatcaacggcacggaagaaacaagcaataagcttgtgatggagataaatcgttgcggatatccgaaattcgacaattgcggtctttttgcgttcttctttttctagcaattatgataaaatatgacatatctcggtcattccaaaagggggatttattgaggatgaagcagactattccgtcctcttttgtcgggctcaaaattaatgaatggtatacccatatccggcagtttcacgtccttgaggcggagcgcgtcaaacgtgaagtagagagagagattgaggatatggaagaagatcaggatctgctgctgtattattcattaatggaattcagacaccgcgtcatgctggattacatcaagcccttaaaggaggacccttctcagcctgagttttcagaattattggaagacattgaaggcaaccagtataaactgacaggactgcttgattactactttaatttttttcgaggaatgtacgaatttaaacagaaaatgttcctaaacgccatgatgtattacaaacgggctgaaaaaaccttgcactcgtttctgatgacatcgagaaagctgagtttgcttttaaaatggccgagattttttacaacctgaaacaaacctacgtctccatgagttatgccgttcaagcccttgaaacgtaccaatcgtatgagacgtacaacgtccgcagaatccaatgtgaattcgttattgcagggaattatgatgacatgcagtatccagaaagagcattgccccacttagaacttgctttagatcttgcaaaacaagaaggcaatccccgtcttatcagttcagccttatataatctcggaaactgttacgaaaaaatgggagacctctctaaagcagccgaatattttgagacatccgtttccatttgcaggtcagaaaagttcgataatcttccgcattctatttactcattaacacaggttctttataaacagaacactacagccgaagcagagaagcaatatcgcctcgggctcagtatcgcccgcgaatacaatgatgaattgtttgtcaatctgttccaatttttgcatgcgttatacggcaaggaaatggataacgcatccgtcaggcacacgtttgattttctggaagaacacatgttgtatccgtatgtggaagaattggcgcatgacgctgccaaattttacatgaaacacggacagcctgaaaaagcgctcacgttttatgaaaaaatggtgcacgcccaaaaacaaatccagagaggagattgtctatatgaaatctaaactgttgtcaggattgctgcttgttgctgtcgggttcagctttacacaggtgatcggccatgaaagccatttggaaaaccaagcggacggcacattccatattgccgcacgcaaccaaacataacataaagacccttctttggaagggtcttattttttgcatgcgtgtccattccaattttatccgaatgcagggtcgatatgctcaagttatctgtcctacgaatgccacctattgatgaaaaaggcataaggagagatgaagagtggggattgaagtgaaaaaacggctcgtatcggctgataaatatgcgttaaaatgtccgaatccgatgacgccggagtatattaccattcataacacggcaaacgacgcatccgccgctaatgaaatcagctatatgacgggaaacagcgaatcaacgagctatcattttgcggttgatgacaaagaagtgatccagggaattccgttggaccggaatgcctggcattcgggagacggcacgaacggtaccggaaaccgcaagtcgattgctatagaaatctgttacagcaagtcaggcggcgaacggtacagagccgcagaagaactggcgattgcgtttgcggcgcagcttttgaaagaacggggctgggggattgacagaatcagaaagcatcaggactggaacggaaagtactgcccgcaccgcattttgtctgaaggccgctgggatgaagtgaaggcgaagattgaaaagaaattaagcggaagtatgccggcgaaaaaagcctctatttcttcttccgcgtctgaataccatgtgaaaaaaggcgacaccttatcggaaatcgccgcatcgcacggtgtcagcgtaaaatcgctgcaaagcatcaaccatatcaccgatccgaatcacattacagtcggacaagtgatcaagctcgctcagacgggttcttcttcaaaaagtcaggctgtgtcttcatatccgcttccatccggtgtgatcaaagtgacgaaaccgctgacgaaagggacaaacgtaaaacaagtgcaaaacgctttatccgcactttatttttatcccgataaaggagcaaaaaatcatggggcggacggcgtttacggcccgaaaacggcaaatgccgtaaaacgttttcaatccgtcagcggattaacggcagacggaatttacggcccgaaaacgaaggcgaaaattgaagaaaaactgtaatcaagaaaacggaagctccccgggcttccgtttcttcttacatacaaactgcggcaagggccttttgaatatcataaatgctttcatcttttttaaactgctttgagacagcgggaagttccgcgcctgaaatccaaattttcagctctgaatcaaggtcaaagcggccggcggtttctacgctgaatctggaaatgctcttgtacggaatggattgaatctccgttttcttccccgtgagtccctgtttatcaacaagaataagacgcttatccgtaaagacaatgatatctcggacaagcttaaatgcggcattgacattctcgccttccagcaaaatacgggccagttctgattttgcttcagccgtcgatattgtcgacgcattgcccagcaatccgttgatgaaccccatgatatctcctccctgatacgtattctatcaaatcatactataaaaaggtttccattcccagatgagtagagtaaactggtgctgactggaaaaggagagcatgttacacatgaaagatagatatgacaatttcgcagccctttccgctgctgaatcggaatacagaattatttatgaagaaaaagagggaagtaaatgtatcgtcctcgctccccacggcggcaggattgagccgggtgtcagtgagctggtgcatgcattttctgaccaaagctcaatttatttatttgaagggacgaagcggtgcgataaccgttctctccacttgacaagcacacgctttgacgagcctctggctttagaaaaagtgaccgcccatcattacgcattggcttttcacgggtatcatgatctgaaaaaggcaaatacactcgtcgggggcgcggatctggaaaaagcaagactgatttgtgatctgctgcgtgaagcgggatttgatgccgagctgacagagaagaatgatcggctggcagggttaaatcccggcaacattgtcaatcggacaaaaaggaaaatggggctgcaattggaagtgagcacggcgcagagacacgcgctgttcagcaattttggctgccggggagaaaaatacacgccaaccgatctgttttttcggtatgtagaaaccgtgaaggccggtttttatgataaatgaacagggggcccgttcttacattcactggagctatgcggcgcatgaagtgcttggcgggcagcacggtgattacagcgtcatgatgcaaaaaccttttctccgatgtcaaaatgatgacattctgccggctgtgttctaagccggcggagaatcgctaattttcaataaaatacggcgttttttcttcagcggcatgcaagtgtgtctgtccgcttccataatacacattcggccgcttgtcggataacagacaagcgagccgcttctgaaattgaatacctgctttacgccgttcaaacagctcgagccttttttccgcaaatgatgccgtcacccggaaagcggctgcgattaaaataacggcgtggctcctccgctggggcagctccatgtttaacagcataaaggtcggcacacagaagtggtacataaaatggttggcctgaaattcctgcagttccctgaacagcttgttcatatgaaaatggttcccggtatgcttcagcacatggcacagttcgtgcgcaaaatcctgccattgctcttcgggtgactttttttgattcaggacgatgctgtacatgccgtcccgcttcagcatcatactgtgcgtatcttcaaaatgaatccaaatgtcaagctccttggcaatcatctgcatatcaatatggagaggggcggtcattcccatgcggcaatataagtttttgacgtattcctcaagatgtgttaaaaaatcgcccaattgaatacaccctttcgaacatatgttcttttttaagcgagaaagaaaagccctgatcggactttgaatcaattcccttttcttttaaaaataaacattcagcttttatatcggctgaacgttaagcagtttaaaggaaaagagcggattatttatgtttcggcctgcggtttttctctttttcttttaaataattaatgaattcaatggcctgctgcttgctttccggggaaaagtcctgcatgtcccgatatgcgatctgcaggtcgggatcggcaaacatgtcttcatctgaaggttcttttccggttaacaaataatcagtcgacactttgaaataatccgcaagcttttgcagcgtgtcgtaatcgggttcagatcggccgttttcataatgagaatatctggcgcgcgagacaccgatatgatttgcgacttcttcctgcgttttcttacctctgagactctttaatcttccgcctatcatccgaaatgacctctcttttttcaacaccctaagttacttatgattatagatacaaaatgtatcaaaagaaagagatgataaaaaagtatcaaaaaggtcttgatgatacgaaatgtatcgtatataatcaacatcatagggatacaaaatgtatcaaaatacgataagaaattgatcaggagggtgagagatgcagccgataatcatccgtttcagcagcaatccggctgaccagagatgtttaggaaaagcaggcggttcgatatcttttaccgcttgcggactaccggtattccgatttgataaccgattgcagtatgaacgctatataggtctgaagaaaaatggagatgtcccttatgaaacgtaaaagctacccgtttttcatctattctggattattgaattcagaacattatgacaaaatagggtccgccatttggctgtttttatggttcatcagctcaacgacaaaggaacatgtaaaagacggcgtaaagtgggggatcgtcctcggacataagcccgtaaaagcaagagaaatggccgatgtattcgcggtcagcgaaaaaaccgtcaggcggtggctcgagagcttggaacagcatgagtatatcaaaaccgtccgcgccccttacggactcatcgtctccgtaaagcactcgaaaagattcacgccgaaaaagacattaacccgcccggaagcaactgaccggacaatatcggcggatcaccgggacaaaaatgtccggagagaaatagatataacaaaaatcatactgctgaagaagcgattaacgacattgctgcccattttatcagattaaggtctgcacaggaggggcggagcgtatacccgtcgccccgggattatcaggccatcgcccgtattgtttccctcggtgcgtcagcacaagaagcaatcaaatggctcggcgaatgctttaccgcttttgaacagcggcgcacctcttcagctgaaacgatcaaggctttcagctattgcgccaagtttatggaagaccgcttgaatgcacgaattgcgggaaggacaatcacaacaaaaaaagagaggaatacgatacatgacaaaacgaacgatcgagcagattcttgccgacctgaaaaacggaaaacgtccattactggcggacagaccggaagaatcagacaaaagccgctttgactgcccgctctgtaaagatcagggcggttatctcaaaaaccagctgggaatggaagtatgggttaagtgccgctgcgccgccgaacggaaagtagaacgcattctcggcgcaagtgagattacagatgcctttcggaagctggatttcaaaggatttatcacgcggggcaagcctcaggcagtcgtcgacgcatatgagtgcgcccttgaatatgttgagaacttcgacaagatgaaaaactgccggaaaaacagcattgcccttttagggcgtccgggatcgggaaaaacccatcttttgaccgctctcagcaattatgtcatgagacagaagcagacaccggtgctgtattttccttttgtggagggctttacggatttaaaaaatgattttgatctgctcgatgcaaagcttggccgtatgaaacaggcggatgtgctttttattgacgatctgttcaaaccgctgaacggaaaaccccgggcgaccgattggcagattgaacaaatgtacgccgtcgtgaattaccgctatttaaatcataagccggttcttatctcgagcgagctggcctgtgacggattggtgcaggttgatgaagccttgggcacaagaatttatgagatgtgcagcgattatttagtcatcattaatggcaattcatttgacgtaaaccacagattagagggggcgagataatgtgtaagctgtgcgggccgaagaaggtcattgtgatggaaacgggtttcggcgctgtctttcacccttgcccgaactgcaaaacaggcactgatttaacgccggtcattaaacggcttgaacgaatggttcaagacgcaaaagcgaggcttgatgcacgtgtgtaaatatatcaaatggcttttttgcctgctgttcagggcaaaacggatagaaaagcaaattgaagcatggcatgaggctgatggaaagtgaggatcaccattgcaagaaaaaaacagccccgctccatggcgggccgtacacagcggagaagaaaaacccatttacatttattccgcttacagcgaagcggataaagagaagttcccttattcaaacggaaggctcatcgcggccgttttcaacttaagttcatactcacagcagatcaacgcggcattgatggcgaaagccccggaactctttgaggcggccgaaacggctctccgcctgctccggggagaaagttctgaagaaaaagaagcgttcataaatgagctcggaagcctcatacatgaagtgaacattttgaaaaagatggaggaagtaaaacatgaatcctaaaaaactgactgacattgaacatacaacattaaaaagccagctggaagaaggcaaggttcgggtgattatagtagacggactgaagaaggaagcatggctcgccgaagcgccggagcacggcaaaacgcttgtcgaaacgcgaaaaggggatctggcccgggtcgaatatgaaatcggctttaaattgaattaatcgaaaaaaacagaatacgtccaagacggaaagcctgcggacactgatcaatcgcgcacatgctgcgcattgattggtgtccttttttgttccgaaaaagaggaggatctacatggaagacttactatttgaatataaacgcacgctgaaagagacgaaaaagtggtacaagcagctggaggcagcggatgaaacggtgtttacttcagaagaactgaaagataaaaaaatcatcagaacgattattacagatttggaatatgtcatcgaatggcttgaaaaaggccggcagcccggcataagaagagcgatagaccgcagagacgcttatcagagaatgctcattaaagatccgagaatcatagaaacctattcgcaggcgctgatgtttgaaccgtccgcaaatgtgactgaagaagacagaatcagactgcgggacgcattagccgttttaacggatagagaaaaagaaatgctgctgctccacaaagcggaatgcttttcgtatgaacggatcgccgccttgctgaatgtaaagaaatcaaccgtacaaacgacggtcaaacgggcgcttctgaaaattcaaaaacagcaggaacaaagaaatcaatcgcctgcttcataagttgtcatacgtttgccacctagaagtgaacagacgatcacaaaaagcggcccgattagaagccgctttttattatagacaatcatgtcggaggtggcggtgatgccgtagcatgaaaaacgcaaaaagagaacaggcatttacaatctatcagtctcataaaggccgcatcacaaatcgcgcccttgccggcaaatcaggcgtatccgcaagaacaatcggcagatggaaaaaagaagggcgctgggacgaggcgcttaaaaagaacgcggaaagcggcggaaaaaacaacccgggcgaaggtgatgagttaaacgaacgccagcggctgttttgtctttattatgtgaaatgctttaacgccacccaatctgcgataaaagccgggtattcaccggaaagcgcgcatgtgacgggaagcaggctgttaaaaaacgaaaaagtcgctaaagaaatcagccgcatgaaaaaggaaatggtcaataaagtgtttgtcgaagcgatggacgttcttcaagtctatgtgaaaatcgctttcgctgacattaccgattatgtaaccttcggaaaaaaagaggttcaggccttcggaaaatcagggccgctctttgacgagaatgataatccgattatgcaggagatcagctacgttgacgttaaagattcgcaccttctggacggaaccatcgtcacggaagcaaaactcgggaaagaaggcattgcaataaagcttgcggacaagatgaaggctcttgaaaagctgtccttgtactttgaccttttccctgaccaatttaaacaaaaaatcgaaaatgaaaaattaaagctggcacagcagaagatggaaaaaacagaagacagccaaaagccgattgacattgtcattacgcggaaagaggaacggccatgattgaaaaagcggtcaacccgcgctttgaagattatttgttcaattggaatgaaacgtaccaatttctcgtcggaggctacggctcgtcaaaaagctatcataccgcgctgaaaatcatcctgaagctgcttcgtgaaaagcggacggcccttgtcgtgcgggaagttttcgatacgcacagggattctacgtttgccttatttgaagacattatcacggagcttgaactgggacatgccgtaaaggccgtttcttcaccgatgcagctcagattttcaaacggaagccggattatgtttaaagggatggacaacccggccaaattgaaatccattcatcatatttcactgatttggattgaagaatgctctgaagtgaagtatgaaggctttaaggagctgatcggccgtctgcgtcatcccgagctttcgctgcatatgatatgcaccacaaatcccgtcggcacctccaattggacgtaccggcatttttttcgtgatgaccaaaaaaaacggttcgtattggatgatcagacgctgtatgaaaaaggcaccgtcgttaagggagatacgtattaccaccattccacagcgtgcgataatctgtttttgccgaaaagctatattaagcagctggacagcttacggcattacgatcctgatttgtaccggatcgcccgcaaaggacggttcggcgtcaacggcatccgcgtgtttccgcagtttcaggtcatggagcacaacgaagtaacggagcggattgcgtccatcaggcgccccctgtttcggaccggcatggatttcggttttgaagagtcatacaatgcggtcatccggctagccgtcgatccggatcaaaaagagctttatattttctgggagtattacaaaaacaaaatgaccgatgatcagacagctgaggagcttcaagaattggcggatcaaaaagagctgatcaaagcggattcggctgagccgaaaagcatccaatatttccgcaggcagggattttgcatggttgcggccaaaaagtttccgggctcaagacttcagtatacaaaaaagctgaaacggttcaaacatatctattgctcagacagctgtgaaaatacgatccgcgaattgcagaacttaacgtacgcaaaaaacaaaaacggcgttctgtcggaagatgagttttcaattgatccccacacactttcagccatttggtatgcgctggatgactatgacgcggcggatctgaaagatgcatcacaaaaacggagacgtccgaatcgggaaaggaggagataggcgttgcctaactatcaaaacgttagagccaccgtctttaaatcaaaaatggccgcgccgcaggcaaggcagatgaacgaagatcaatttgccgatctgtacggcgaagacatcatttcaccgccctataatctcattgaactgaaaacaatcgccgaatactcgacgattcttcagcagtgcattgacgcgtatcgggtcaatattacgggttttgggttcgatgtggaatatacctttgatgtaaatagcccagattgctcaccgtctaaaaaggcccgggccgaaaaaaactggatgaagctggagagcttttacaaatgtcttcattttgatgaatcggccgagacggtcctcggatatgcgatagaagaccgcgaaaaaacgggcaacggttttctcgaagtgcttcgggacggcgcgggaaaaccggcggggattgaatatctggatgtgaaacatatgcgcgtctgcggtgtgactgatcccgttgaagttacattttcatatgaagaaaacggcgcatccaaaacgattaaaaggcaaaaacggttccgtaaatatgttcagatgctgaacggacggaaagtgttttttaaggaatacggcgatccccgcatgatggacatgagaaccggtgaatacgtaaagaccctgtctgaagaataccgggcaaatgaagccattcacttaaaaatcggcagcggcacttacggcattccgcgctgggtcggcaatatcgtcaatctgtacggcgcccggaaagcggaagaactgaattttatgtatttcaagcagggccgtcacgtgccggccgccattacggttgaaaacggcatgctgtcagaaacctcgtacaaagagcttcaggattatatgaatgacctggaaggggtggaaaacgcccacaaatttctgctgattgaggcggaaggcattgcgaaggaaaaagaccttcacggaggcgaagacattacgcccgtgtctgtggaaattaaatcacttgcggaaattctgcaggatgatgcgctgtttcttgaatatgacgacagaagcagaaataaactccgttccgctttccgtctcccgccgctttatacgggagaggcgcaggaatacaacaaagccacagccgatacggcacggaaaataacggaggagcaggtgtttcagccggagcggaaaacgctgattaataagctcaacacgttatttttgcctgaactgggtctccacgatgtacagctcacattaaaagggcctgattttcgcgatccgcttgaaattgcgaaggtgcttacgccatttatttccgccggcgcggtctctcctaatgacctccgtgatctggcgggaagagtgctcggcaagacgcttgaggaatggcctgaagagtactacagccggccggtgctgaaagggaaataggagcaatcctgaaagggggtgaaaacatctcgtgccgagagaattgagaaatgccgtcatcagttttgtgagctatgtcgataaggcggcgaaccaaacggaattcttttttacaaaatcagccggaggccttccgtcatttgaaaaaaaggtgcaggtgtttacaaaaaacgaatcggatgagcagaagcttgtttacggcatcgtttacgagccggatgtccccgatgcacatggcgattatatgacggctgaagagattgaaaaggccgctcacggttttttggcggacgcccgcaacatcgatacaaatcataattttgaaggcgggaccggcgaggtggtggagtcgtacgtcgccccggatgactttgaaatcgggaatgctgtgatccggaaaggatcttgggtgcttgtcaccaaagcttccgatgaagtatgggatcagattaaagccggtatcattacgggctacagcatggcgggaaccgctgacgtttacgaagagccggcagaaaagcaagccggcttattcggcgcagtcaagcaatttctcgaccgtgaccgcaaatcaagaaaccgcaagggagaggacttgaacaagatgagaaaagaagacgtaagagaatcgattgaacacgcgctgcacccgcttttaaagcggcttgacagtttggaccagaacacggaagacaaagacggggcggctgcgccgtctgatgaagaaaagctgaaaacacttgttgaggacatgctggcgccgattattaaacgcattgaagcgcttgaaaaagtaagaggcgcatcaaagcagccggaagaagagacgggcggtcaagagcctgttaaaaaatccatttggagcggactgctttaagcccagtcagaaggaggaactgtagagtgagaaatcaagatatcatcagaaaggcggaaatgtcactttccgctttaaaaagcggcggtttaatgaaccccgcacaagcttcagcatttatccgcatggtgcagaacacgccgaccattttcagcgaatcgcgtgtgattcaaatggaaaatgactcgcagaaatttgaaaaaatcggtttcggccagcgtattctgcgtgccgctgaggaaggaaaagccttaactgacgatcagctgaccgtcccgtcaacaagtacggtgcagctgaatacgaaagaagtcattgcggaaattaatatcacctatgacacgcttgaaaacaatattgaaaaagacggcctgcagcagacgatcatgcagattttggcggagcgggcggcagtcgatattgaggagctagtcgtaaacggcgatacatcttcttctgatccgtacttggcacagcttgacggaatccgtaagcagactgtatctcacgtcattgacggaaacggggaagagctgtccagagccacatttaaaaaaggcttaaaagccattccggcaaaatatttgcgactgcctcaggaattcagattttacacatctcaaggcatggagattgaatggaaagaccgtgtggctgaccgtcagaccaatctgggagatcttgcggtgcagggcggtttgtcttcagcattcggcgttccggtcaaaggagtgtccaatctgcagccgtactcagtcggagaaggtgattcccagtacgatgcgtctgacatcattttgactcacccgaaaaatatcattctcggtttttcaagaaatatccgaatcgaagtagataaagatattcgcagccgcaaatttattatcgtactgacggctaaacttgacagcaaatttgaagaagaagatgcaagcgccaaaatcgtaaacgttaaagaataagacgggggtggcagttatgttaattcagccgtctgacgttgtttcatattcagtttatgatcaagtcaaaaacaggccggagccgcttcttatacaggacattctggaggcggaggcggaggcggccagaatggcggggcattcgttcactgaccctgtttactcaccgcttcccgaaaagattaagcttgcgttattaaagctttctcaatattttgcgctgatcaaccagaatgaagcagccgcttccgcctatcaatctgaaaagataggcgactactcgtatacggtggcaggtgaaggcggaatcagaaaaccggcggtgcaccatctgctctgtgaatatatcgcgccgggttattctccggtttctgcacacgcaaaggtgagacctttatgagctacgaacggctgctcactgacagatgcgatatttatcatgagacggtgtcagttccgaaggccggacgcttcgggattcccgccgaaaagctccagcctgtcttttcttatccggaagtgcccgattatgaagacgtgccgtgtctgtttgttgaaaaacagcagcagcttattcagcttgagcctgatcataaggtatatcagcggtttctcgttcattttccgaaagaggccgttgtgcgtgtcaatgacaaaatcatttgggaaggacaggcgtatattctggaaatgccgaagaaaacaagacagcaccattgggaggttatcgctgtgagagatgacagactatgagcataaaaaaccttgaacaatggaatcggtcgctgcaaaaggcatcatccggagaatttgcccgtcaggcaggcgaatggctggaacagtcaggagaggattttctcgacttggtacgggaggagcttattcattcgggcgggattgatacagaaagcctgctgtcttctttccggaaaggagcgcaggatcacgtatggatcattgaaaacgggggactgacccttgaaatcggcaccaatgtagagtatgcctcattcataaatgacggacattggaccgtctcagatgaaaatgtcagatgggtgcccgggtattttcaaggctcccggttcatctatgatccgtcagcttcaacgggaatggcgctcaaaaaacagtggatcagcggaaatgggttttgggacaaagcccttcttttgtatgaaacactcttcgccgaatcgctggacaagcgtttcaatcagtggcttaacacgttggggggagatatcggatgaatcgcgagaccggttcaatcgccgcttttttgtatcagcagtgcggcgtgcccgtatatgaaaatgaactgcctgaacaatttcaggtgccgtcactttacatcccgcccccgtatgcttttgacgagaatgacacagtctccacctttaagaagacatacagtctgaatgtgaagctgttccatgccgactcggtgcaggccctctatgcagccgacgggatcgccgatgcggtgagagaatcaagacagctgattccgctgcttacggaatcaggggaggataccggtgatttcgtccgcatcagccgtatcgaaacaagagtcggagacaaaggcgaggcagtgatcaccatccgctggacgagccgctactactatcaaaaacaaacatctcccgcactgcgggatgtggacattaacagcggggtgaaacaaaagtgaaacaatataaaaagaaaaacgccgcaacggcggaacgagcggttctttatgacacggcggatttaacaaagcacgcgaaggagcttttcggcgtaaaacccgagattctccagggtgctttattcggcgtgaagcaaaaacaaatgacaaaagcgcaagccaagtcttacattgaagcatttttaaccaaggaggtcatgcaataatgaacggcggaacatttacgcaaggaaaagaaaaagaacgtgccggaatctattttaactttaaaacaaccgcccaggagcgggtatcgatcggtgaacgcgggattgtcgcccttcccgtcgcatccggctggggggaagcgaaaacattcgtttccatttcaagcgttgaggatttgaataaaaaagtggggctcagtattgaagatccgtcactgattctgcttcgtgaggcgaaaaagaaagcaaaaaccgttttgatgtaccgtctgacagagggaatcagagcgagcgcagatctttcgcaaggtgttaaagcaaccgctttgtacgggggttcaaaaggaaatgacatcatcatccgcatcagtgaaaacgtccttgatcagaccgctttcgatgtgaccacttacatggatgaagcggaagttgacaaacaaacggtgaaaaaagccgaagaattaaaagcaaacggctatgtcacatttacgggaacgggcgaactgtcggcttccatcccgctgacaggcactgaggaagaatccggggaaacgttaaacccgcaggcaggcatccgtctcgcgggaggaactgataaagcaccggtcaactcagactatacggattttttagctgcggctgaaacggagaatttcgatgtcatcgctcttcctgtcgcggaaaacgatcagctgaaagcgacatttgccgcattcattaaacgccttcgcgatgcgcagggacagaaagtgcaaggggtgaccgcccattacagcggggattatgaaggcattatcaatgtgactgaaggtgtgctgctggaagacggaactgagattaaagctgaagatgcgaccgcctgggtggcaggcgcaagtgccagcgccgcatttaatcaatccttaacattcgttgaatacgaaggcgccgtcgatgtgctgcaccgcttgactcatgatgaagtgatcgaacgtctttccaaaggtgaattccttttctcttatgatgcccgtgataagtcagtcagcgttgaaaaagatatcaactcattggtgacatttacggcagagaaaaacaaaaagttcgcgaaaaacaaaatcgtccgtgtgcttgatgcggtgaataacgatttgacacgtgaactgaaagccttaattaaatcgaaaaaaggcaccggaagcgatcttcctgcgacaaatgacggccttcaattcgtcaaaacgatgattattcaatatttgacaacgctccaggatgcgggcggcatcgctaactttgattcagacaaagacattacaatcgggctgaatgaagaccgcgacggctttttaatcgatctcgccgtacagcctgtggatgcggcagaaaaattctactttaatgtggaggtaaactaagatggcattaaaagcgcaaaacacgatttcaggaaaagaaggccgtttatttctcgacggagaagagatggcgcatattaaaacctttgaagcaaacgtggaaaaaaacaaatcagaagtaaacatcatgggccgccgcatgacgggacataaaacaacaggcgccaacggaacgggcacggcaacattctataaggtcacatccaaattcgccgtccttatgatggattacgtcaaaaaaggcagcgacccgtattttacgctgcaagccgttcttgacgacaaatcatcaggccgcggaacagaacgcgtcaccctgtatgacgtcaactttgattctgcaaaaatcgccggactggacgtagactcagaagccctcgaagaagaagtgccgtttacctttgaagatttcgatgtgccggaaaagctttctgaaacgttttaaccagaatcattgtgagtgaaacaggccttttataggcctgtttttttataaaaaaagagtaagggagttttcatcatgagcgaaaaaaacgaacaagtatatgatctgtcattctttatgccgggtaaaacagtcgaggctgaggagatccgggttccgctttcaaagcgttttgtcgataaaaaaggaaacatcgtgccttttatttttaaagccattacgactgagcgcattgacgaactggagaaggaaagcacgacatataaaaatgtgaagggcagaggccgcgtaaaagacttagacagccagcgcttctatgcgcggatcgcggttgaatctacgatttaccctgatttccggtctaaggagctccgcgacgcttacaaaacggcagatccggtcgaggtggcaaaacgcgttctttcagtcggcggtgagtatgcaaattggctgaataaagcgattgagatcaatggttttgaagatgaattagaagatctggagcaagaagcaaaaaactgataaaagatgggaataaggaagccgtgtatctctattacgcgatgcatgagcttcattattctccatcagaactgaaagagttatatgaagcaccgagacattttaaggcgctgttgtacggtttaatcggttacaagctggacattcttgaaaaacaagcgaagaaagggggagcgacatcatggcaaagctgaccgcccgttttgaattggaagatcgggtttcaaagaaaataaggaaaatccaaaatggcttcagagcgcttgagaaatacaggaaaatgacaaaacgccaaagtgaaattgatatacgcaaagagagtaaatctgttttaagaacaattgaccgcatccagcgctctatgaaaagaaagctgggcgcacaaatgatctctatttcagctgaagacggagccagtgccgtcattcaaaaggtgcaagcccaattagcgggtctgcctgcgtctttaaccgttaaaataggagcaaaagacagcgcgacagcggcatttgagagattgcgggatctggctgccggttttaaaggatttaccgtttcactgtatgcgtcagacgaagtgactcctgccatggaacgtatcaaacgctacatgcaatctgcgttaaagaacgggtactctgtcactatacgcgtcatagatcacgtcatgaaaacagtcggccgaatttcagcggggattgattcgctgacggggaaaaacaatgtcattcaattatcgttaaacgaaaaggtgacagcacagctggctgcaatgcaaaagaatatgccggacgtcggaaaagcttctgcatctgctgctcctgcttcgccgaaaaatgatttttcaatgcttgactccattgcagacaccttcatgaaaaaagtcaatgatatcgcatccaaattttatccggaaacaatcatagcggaactggataaattcgctgcaagctttatgaagaaagcggacgaaatcgcgagcaaattcagcccggagacaatattagcagagctggataagttcacgacctcattcatggggaaagtggatgaaatcgcaagcaaattcagcccggcaacgatattagccgagctggacaagttcacgacctcattcatggggaaagcggatgaaatcgcaagcaaattcagcccggcaacgatattagccgagctggacaagttcacaacctcattcatggggaaagcggatgaaatcgcaagcaaattcagcccggcaacgatattagccgaactggacaagttcacgacgtcattcatgggaaaagtggacgagattgcaagcaaattcagcccggagacgatattagcagagctggataagttcacgacctcattcatgggaaaagcggacgagattgcgagcaaattcagcccggcaacgatattagccgaactggacaagttcacgacgtcattcatggggaaagcggacgagattgcgagcaaattcagcccggcaacgatattagccgaactggacaagttcacgacgtcattcatgggaaaagcggacgagattgcaagcaaattcagcccggagacgatattagcagagctggataagttcacgacctcattcatggggaaagcggacgagattgcaagcaaattcagcccggagacgatattagcagagctggataagttcacgaccttattcatgggaaaagcggacgaaatcgcgagcaaattcagcccggcaacgatattagccgagctggacaaattcgctgattcgtttatgaaaaaggtagacggggtcgtgagtaaattcagtccggaagccatattgaaagaactggataaattcactgattcatttatgaaaaaggttgatgacgttgtcagcaaattcagtccggagaccatattgaaagagctggatcattttactgattcgtttatgaagaaagtcgacgacgttgtcggtaaattcagtcctgataagctaatcgaccgcgccgaacaatttgtaaatgacacgattgaccgaatttctgagaaattcgattttctcaatccggataagattctggaaaaagtggagcagtttacttcctcactgttcggaggcattgataaaaagttcggcaagttcagccctgatgcgatcatcgaaaaagccgaggcatttgttgataaaattgtcagcaagattgccaagaaatttgagaaattcagcccggacaaaatcatcgaaaaagccggggaattaatagaaaaaatattttcaggaatcgctgaaaaattaggcaaactcaatatcggcggattattaggaggcggcacgaaaaaagaaaagagtaaggggagcctttctgccggcggcaccaacagcccgaagcgtcctgagctgacaaagggtccgcagcgcacgggaccatcaccgaaatcttcaggaaggtcagccaaaaaaaccggcggggctttggggggcggctgctgctgtaccggagtgacgaggggcaaaagcagtaaagtcgaagggcggaataaatcttcgaaaagaggttcctccgtaaaggaaagcaaacaggcatccgtaaacacgccgaaaacaaaaggggcaggtaaaggcatcggcgggcttttgaaaggcttaggagattcaaaggcgctgaaaggcggtatgaaagggttaaaaggtgccgctaaaggaattcccggcataggtgaattgttatcacttactgatttagccggcatcaataaagataatgcaggagagaaggtcggctcagcaggcggcggtcttgcaggagccgcggccggagcggcaatcggcagcgttgttcccggagtgggcacattaatcggcggcgcggtaggcggcatcgccggcagtttaggcggttccagcttgggagaggcctttgattcaggggctttgaaagacacatggaatgatatttccgaagcggcgcaaagtgcttggacaacagtacaagatacttggggaagcgtttcatcctggttcatggaaaatgtatggacgccggtttcatcagctgtcgccggagtggcgacaagcatctggtcaaatatcgtgaatgcatggacgacgattcaagggattttcagcacggtgtcatcctggttcatggagaatgtatggacgccggtttcatcagctgtcgccggagtggcgacaagcatatggtcaaatatcgtgaatgcgtggacgacgattcaaggtgtcttcagcacagtatccggctggtttatgagcactgtctgggagcccgtaaaatcggctgtcgtcggagtagcgacgtccatttggagtaaaatcacaggagcttgggataaaattaaatctgttttcagtacggtatccggctggttcatggatattgtctggaacccggtgaaaaacatggtggaaaaagtcggaaaaggaatatcagacgctttcacgactgctttagatacggtaaaggatatatggaaagggttaagcggctggtttgagaaacatataaaagaacctcttgtaaaagtgggaacagccatatcagatgctttttctgcagcattcgactgggtgaaaaagatttgggataaaaccggcggcaaattgatttcaggcgtaatggactttgtcacaggaggcggcggagataaaaagaaaaaaacggacaaaaacgccacgggcggctacattacaaagccgaccatttcctggatcggtgaagccggtaaagaatttgtcatccccgtcgacaacaatcgcggccgcgggaagatgctgctttcacaagctgcgtctaagctcggcatgcgtgttgtcgatgatatgggcgcggcttcggctcagtcttccgctgtgccggcgggagcgggcggtgtttcttcttcggcgtctgtatcggccgctgcgtctgtggatgcttccggatttgcggggacggcttcatcactcggcaaacagtttactgaaggctttgacagcggaatcagcaataaagcggtggatatggacggctggaaagagaaaaacatcggaacgccgtttaacgcccttatttcgtcttcgcccgattacggaaagcaagtcgctgcgggctatgccaaaggtcagaatacatcgccgacgggcaccgattcgtttttaaaaacaaaggtgaaaacaccttatcaatcggaggttaatcaatcgtcatcatggggcgccgccacagtgaaaggttattcggccggacagaatgcaaaagatacgggaacgtcgcaatacgtaagcacacatatcaataaaccgtttgttcaatcaagagattccgcgaacggctgggggtcaggcctgatcggacacttcgtatcagggatgactgcaaaaggaagcgaagtcaaacaggcggccaaagatatggccaaaaaagtcgaggacgcattcagggaagagcttgatattcactctccttcccgtgtcatgatgagtctcggacgctttgcttcagtcggcgtcgtcaaaggtctcagctcagttgacgtgaaaaaatatgcggaaaaacaggcaggctcgcttgcagcagccttttccggcatgggtgcagcgggaggaagcgtcaaagaatggcttttggccgcaatgaaagcaaccaatacgccgatcagctggcttccgggattaatgacgatcgcacagcatgagtcaggcggcaaccctaattccattaatctatgggacagcaacgccaaagccggacacccgtcacaggggcttatgcagacgattccgagcacctttgaagatcacaaagcgccgggcatgaatgatatcagaaatccaatccacaacgccgctgccgctatcggctatattaaaagccgatacggctcgatcagcaatgtccccgggattaaaagtatggctcatggcggcccttacgtcggttatgccaatgggggtctgattaccaaggagcagatcgcccgtgtcggcgaagggaacaaacgggagtggatcatccctgaagagcggggcatccgcggccgttatctgctgcaaaaagcggctcaggcgctcggcatggaagtgtccgatccgtcccggacggaaccggcggcgctttcagccggcacggtttccgcagccgttaaaggcggcggccaaaccgttcaaaaaacgggaacaaaagaaattaaaatcgaattcagcggcgatcagcatttccataacgggcaggacgccgagagcctagccgccaaaatcaaacaggcgctgattgatgaactgcaaaaagacatttataccggagcaaagggggccgttgcttttgactaaatctgtttacgaattttggctgtctcaagggaaggacaagctccggcttcccgttctccctgaagcgattgatatcgcaaacagcgtgcagaatgattccgtgaaagtcaccggacttggagaggtgacgtttatcgaagaaccgggagcgaaagaaatttcgttctcttctttttttccgaaacggtacagcccgattgccgaatatcaaagcattccttcaccggaaaaagccatttcagccattgaagcatggatgaaagcgaaaaaacccgttcagtttttgattacagggacaaaaatcaatgtcacatgcagcattgaaagctttaattacagcgaaggtgacaatgaaatcggcgaccggaattttgatatcgtactgaaagaatataaaaccgcttcgccaagaaaaatcaaacaaaagaaaaaaacgaaagcgaagcgcccgtccaaagcttcacccaaaacatataccgtcaaaaaaggggatacgctttgggacatcgccggcaagttttacggaaaacacacggagtggcggaaaatctggaacgcgaataaaaccgccatgattaagcgcagcaaacggaatatccggcagccggggcattggatcttcccggggcagaagctgaagataccgcaatgaaacgggtgaaaagatgattgaactatttgtcataaaagaaacggagtggctcgagcttgtcacagaaagcgtaacgctggaaggacacagatatcaggcgccccgctccatcgaagcgacgattgtcgtaaagcagggcagccagacgtattacggcgtatcagaaggggatacggttttgttcaaatggaacggaaaagagctgttccgcggcattgtttttgcaagaacgcccgatgagcataccgtcgccttcaccgcatacgatatgctccaataccttgtgaaaaaccaggacgtttacgtgttttccaacaagcgcgctgatcaaatattaaaaaggatcgccagcgattttcaaattcccgtcacatccattgccaacacaggccatactattaaatcactcgtttttaaaaatgatacaagcctttacgatatgatgctaaaagcgttaaagcagacaaaaagccagacggggcgcaattatcagctctattcagaaaaaggcaggctcggcttgcgtgaatggccggagccgtctgacatatgggtgctggaaacaggagttaatattacagggtatcaatacagcacctcaattgatgacaccgcaacccgtgtcgtcatgcggctgcaaaaagacaataaaacgataaaggcttccgcctcagacagcgccggcatgaaaacattcggcgttttgcagtataccgaaacggtttctgacgacattaacgaagcccagctgaaacagcgcgcaaaagtgaagcaggctgagaaaaaaggcattaagaaagagctgaaaaatatacaggcgatcggtattcctgggttggaaagcggattgcccgtctatatttcaattccggaaatcgggctgaagaaaacctattatgtagatacggaccgccatgaattccaaggaacaaaacataccatgacgattgacgtcacggagaaaaattcacttccggaggggacagcctgatgagattaagtgatgccattaaacatttagccgtcggagcggttgacgctgaagcgccggtggagctgatgccggccgaagtgacctccgtttcgccgctcgagctgaaactgaaagatcacgacaaacttttgattccgtctgatgcactcattgtgccgaagcggctgagatccggagaagatgatcagctccaggcgggagatcgggtgatgaccgccgctttaacaggaggacagtctttctttgtactggacaaaatttaaccggcatccggacggagatatacgggaatatcagcctattaaagccgcttcatctgccgaagagggcttttttacatgaacaaatctaaaaggagcgggtgcaatggccctgacaccggaaatcgaatttgaagatttggaggatgcgagtgaggctgttgagacttcacaaacctaccgaattgactttgaaaacaaccggattaccaatgaactgataaacggactggacgcaatcagacaattcgtctatatcgctcttcacacagaacggtattcatattcggttttcagccatgatatcggaaacgaacttcaggaagtgctttcagatcagaacacgacggatgcttataaaaaaatggagattccaagactgatagaagaagccttgctgtatgatgaccgtattttggccgttaccaattttgagattgagaaaaaagatgatgccttcatcgtctcttttaccgttgaaactgatgagggcatgcttgagatagaggaggtgctgggtgaggatgtttgaagctcagacgtttgacgacattatggacagaatgctggcgcgcgttacggcggatattgatacgagagaaggcagcgtcatttacaatgcgctcgcgcctgcggccgctgagctcgcaaagtcttatatttggctggataccgtgctggagctcgtgttttccgatacggctcagggtgaatttctggacaggcgtgctgctgaggcgggaattgaacgaacacctgccactaaagcggtcagagccggagaattcacagcgggcatcaccattccgccaggctcccgtttcttcgttgataacctgtattttcaatatacgggggatggaacgcttgaatgtgaaacagccggtgaagcgggcaatgccggcatttcggggcagaacctgctgccgcttgatacgatacccgggcttgagaaagcagtcatgcgcgatatattaattcccggccgtgaggaagaagatgacaacagcttaagggcgcgctattttacccgtgtccgccgggaggcagtcagcgcaaataaacagcattataaacaatgggccgaagagattgacggcgtcggcagggcaaaaatcttcccgctttggaacggagacggaacggtgaaagttgtcatcacaaatgcgaatttggaaccggcatcagatattctgatcaaaaaagtaaaggattatattgatccggacgaagggcagggagaaggacaggcgccgatcggagcggcagtaacggtggaaagcgcagtatggaaggaaatcgaaatctccgcttccgtgctgcctgagctgaacagctcgatcgatgacgtaaaagcggagattgaaaaaggcgtactgaatttattcaagaaaatggcctttgaagaaaacaccgtccgtttatcacaaattaacaacatcgtttataactcggcatccgtcagtgactacgccgatattaaaatgaacggtgcggcagaaaacctcgtgctcagtgacgtggaaattcctaaactcaaagaggtgaaaatccttgagcagactcgatgagatgacggcgtacctcccgccgtttttaacccgattaaaagagatggcacaactgcttatggcggaagctcctgagtttgagcggcagaataacgatattttcgatttgacggatcagctctttatcacgacggcgacatgggggcttgaccgctgggaaaaaatattaaaaataccgcgggaatcaggtgacacggaggatatgagacggctcaggctgatctcgaagatgtcgaatattccgcccatcacacatcaagcgatcgagcaggcgctaaaccgttttttaaaacatccgtcagcttatgttcggatgtttccggggcagtatcgtttttatgccgatatcgggcttgatgacctgcagcacatgaacgagctgattgaaacgcttgaaaaaatcaaacccgctcatttggcgtatacactgagagccgcattaaacgaaacactggaaatcaaagaccgggtcattctcaacaatcggagataccgaaaagtcagtgaactgaaggtcggttattccgtcacactcaacaataacgaggtggtcttaccatgatatcagccgcttacagacagcgtgccgcagccgatctgaaaaacaggatcacaaaagtgctgttaaacggcaaagaaactccgattgcggacatttccgtaaaagatgccgcagtcaccgttctcacacgcagggaagaagacgtcaaacacattgaaaccgtgcagatgcttgacgaaacaggaagcgtcattacagaacgaaaaacaaatttagatctcagcaataacagaacgcttgatttaagatttacctttgaggtggtgtaacgatggcttacgaagaaaaaacagactggcttccggacgatccgattaatgaagatgacgtcaaccgctgggaaaaaggcataaaaaacgcccacacggatctggcggcccataaaaacgacatgaacaacccgcacaaaacgacaaaggcgcaaatcggcctcggaaacgtggacaatgtccagcaggcagcaaagaaagattttgaccggcacaatcaagatctggaccggcatgtgacgaaagaagagcgccagaagtggaataacgggcaattgtctaaaatcacaaaagatgatggctccgcttttattaatatctctgacggacaggattttcatcagaccgctgccagccagaataagacctttactttctcagcagctgcaaccggaataaataccccgcctaaaccgtcagagggtatatacctttattcttcaaagaataacggagaggcggccgctttctcagatgacgggggattttggagaaaaacgctgaaaaacggcatctggacggaatggatgccatttgaaacagctgccggagcacaagcaaaagtaaatgagcatgccgacaaaacagatcttcatgtaaccaagtctgacaaagacaaatggaatgcagggcagttattcaatctgactgacaatgacgggaatgctaaaacggtaacagaaacaaacttagacaatataaaaacgtccggcatctactatatatcagttcagcatacagaaaataagcctgcggaatacggacaattaattgtcatgcaaagaacccgcggagcatcaccgacttttgtccaaatgtttatagacacagtgaccgccggaaatcccatatacgtccgaagtttcagcactaaaggcgtatggtcggaatggagccaacaagaaacagattcaggctctcaagcaaaagtagaggctcacgccaataaaaaagacattcatgtcacacaggcggataaagatatgtggaacggcgcacagctttcgaaaataacaaacgataacggcggctatcttctgacaattggtgatgatgataactttcttgaaaaaatcgttaaaaacggcagggcgttcggcaccttttattcaaccggcaaagcggcaaacagtccgagcaacgcttcaacccgcggcatgtttcattttacctctcttgacagtgaggggaaaggaacgtttgggtatgtcattgccgtcgattataaaaataatatgttcacgaactatttggatttgaacttgggctggcagggctggcgtcgcctcgttactgaacttgatactgagaatgtaccttggataaatgttccttataaaaatggcgctaaatcaggagacaggccgcttcaataccgtaaagtgggaaacacccttcacctgaacggacacgttcttacggacagagaagtggtattcgggagtgtgccatcctcttgtgcgccggccaaaggcgttgtaacgatggttgcagccagcggcaccaccggttacagcaaatttattatctattctaatggagatatgaagctgacgggaattatggccaatatagaaaataacgtgaacggctattatattgaccttgttttggcactcacgtaaaggagcgagaatatgaaattaatatttccgtatgacaatgacaacatttatacaggcactccggttgagctttatccggattctgagacaggagattatgtgatgccgcctaacgctgcgggctttccgccggaaataaacggcgaaggcatgtggcgcccattttttgatgaagagaaacaagaatgggtggaaaccgctgacgaagcatataaagagagcttaaaaaaagatacggctcccgattcaaaccagcttgcaggcctcggcggacagctggcgaatgagaaattggccagaaaagcagccgaacaagcgcagcagtcactcggcaggcaattagcgtctttaaaactggaactcttaaacgtaaaaggagaatgaaaaaaatgaaaaaacttaacttttgggtttacgccttgttttatgagtgggcctcaacagaaatggtaaaacaggctatgggctatgatgactgctctgccgaagatctggctgaaggggtggccgcgaagtatatcacgcctgaggaatttcaagaaataacgggtgaaacatacgaaaactataaaaatgctgtgtcataagccaaacggctttttttatttgtcatttttaataaatgagaacaggaggacggccgatgaaaaagcattcatttgaatttcccgccgatcaacttggcaggcccggcgccgtaaaagcttatcgcggtaacaaaaacgattatgtcacaccggttgctgatttgtccggaatggcagagcttcttaccaatacgccgctagaagcgattgaagtctacagccaattcggacaagaccgtttaggagccgtcttaatagacagagcacaggggtgggcttattcggaccgcagcggaactctttttatcgaagagagcgaggataacaattcgtggacagcttcacattttgtcgcagtaaaaggcggagtgctgaccgcttcggggtgggtcagcctgacaaaaagatattaccggttccgttttgaaaatggaaatcaaaagcagtccgaatttgttttataccaatctgtcggtacgggcggtgatatggcgttttcatatacagacgtgatttttcatgaaaatgcagcagaggcgggcgagggaagcatcttctcagcaggcgcttggaaaaaacttctcgtcgaaatcaccggtacggctgagtcgggccatgtcgcgttttgggggagatccatctcgggaaaaaatgtgccgatcagaggaatcaggtctgatgacgggacatcagccgccggtacgtcaggcacagaagaagtgtggtcatttgatattgccggctttaaggaaatcgtcatggaaatcaagagcatttccggcgggagcctttctgtcaaaggcacggcattttcttaagaatgaagcttccgaagggaggtgagaacaatgtaagaggagggagcggaagtgcttctggatgaacaagcggtgcaaaaagaattcgcagacatcaaaggtgaacaaaaggtgcttgaacagcgggtagccgcattagagcgggtatcagaccggcaggatcagcaaatcatgacgctgaatgaaaaactgaacaaaattgacgaaaacacaacatggattaagcggaccattacaggagcgatcgtgacagcaatctgcacgggcgtcattggcggagcaatcgccatcatgtacaatctgctgcaaaagtaagggggaaaccgatatgaaattcgcggacaaaggcacggtcgtcaggacggtgcttcttttgcttgctttattgaatcaaactttgctgatgttcggcaaatcgccgctgaatattcaggaggaccaggtcagccagcttgcagatacgctgtatgccgccgggtcggccgtttttacaatcataacgactgccgccgcctggtttaaaaacaattatgttacagcaaaagggaaaaaacagcaggctttattaaaaataaacaatttatcgaaataggagagatgagaatatggtaaaaatcacacaggattttatcccggcaggaaacaataaccgcccaggctatgcaatgacaccgatttacattacggtgcacaatacagccaataccgcagtcggagctaacgccaaaagtcacgcaagctatgtgaaaaatcccgatacaccgacaagctggcatttcacagtcgatgatacggaaatttatcagcatcttccgctgaacgaaaacggctggcatgccggtgacggaaacggggacggcaaccgtaaatccatcggtattgaaatttgtgaaaacgcagacggcaacttttcacaggccgtggcaaacgcccaatggctcatccgcacattaatgacgtcgcacggcatcccgcttgcgaatgtcgttgcgcacaagcattggtcaggaaagctttgtccgagaagactgctggatacatgggatgagtttaaagcgggaatcggttctgaggaaagacagacgtataccgtccaaaaaggagatacactgtcggcgatcgcgcggaaattcggcgtcagcgtggccgatctgcagaaatggaataacatcgctgacccgaacttgattaaagtcggacaagtgctgatcgtcagcccgccggttgaagcactgtattctcttccggacgaggtgatcaagctgacagagccgtacacgtccggtgaaaaggtataccaggtgcagaacgcgctcgccgcgctttatttctatcctgaaaaaggagctgtcaataacggcattgacggtatctacggtccgaaaacggcagatgccgtggcccgcttccaatctgtaaacggactgacgtctgacggcgtctacggtcccgctgtaaaagcgaaaattctgatgcagctttaacaaaaaaagctgagtcccgttcacattgcgggattcagccttttttcttttttaaccggttcaataacccgagattcctcgcccgcatcctcagcgaataagcggaaagcccgaagcgtccgtaatccacaaactttacgcgtctgacaattttcttcacatcatcacctgtcgcatctctttgttggttttattatatgaaagatatggaaaaaaggaataaggacaagagccgtgtctcctgtccttagtgtaatcaagcttttttttgtttatacttgtcaatcagccgctcgttttctttgaaaattctggcggtatgagggctgacctggtaacttgcgatacttgtcattgaacgttttttaaacattttgaacggtttcgctctttgttccggctgcccgttttgaaatgcctgctccatttaaccgtcaccttcctcttctattggcagcattaaatcataaatgctcgttagcgatgtgaaaagcaaataatcgaattccgtcaacaggttttccgacgtgagtttgatcacgtaatggcggtcctggactgtaaacggaataagcacaagcctgcctttttgatcatagtagacgtctttacggttaagacgggactgaacgtccgccgcatcaggcatatgctccgtcaagcggtccttatccgattgtgcggaatagtcgcacaaggaagccgtgacattcattttttctccataagcggccagcagtctgctgatgccttccgcataagcttctgtacttccataatatacatggatcggttcatttttcaacagatattgataggttttcagtttttcaagataggagtgaagcatttcgttattttcttctaaaatttcccgcgtatccgtctctaattcattgccggcgagctttttgatatacgcgctcaaaaagataaacgcatcaataagggcaaagcagacggcaacaatcaaatattgtctccatgcggcaaagagcgattcgggatcatatgtccaatagaccatggcgcctactacaaatagtaaataccacgttttacggatggcaaacattttttcttttacctttgcttcataccgccaggatgcgtacacatataaaatgagtgcggccgccatcgtccacaccatgatctgaaaaaacaaaagcatgagcatccctcacaattcgaaaaatggtctgctatgttcattctatgtcatgacatcattttcctgtcacaaaaaaaaccgcttctgtaaagaagcggatgtcatcagaaaaagagatctaagatgaaaaaggcgatggcgccgagtgtacctgcaatcggcagggtgatgacccatgtaataagcatccgtttagccgttccccagtttacgccttttacgcggtgggaagcgcccacaccgagaatggaagacgaaatgacgtgcgtcgtgctgacagggagatgaataaacgtggccccgaaaataatggctgcgccggttaagtcggcagatacgccgtttaccggacggattttcataatttttccgccgacggttttaatgattttccagccgccgatggatgtgccgagacccattgccagggcgcaagagagctgcacccaaaaaggaatggcatcacttttatgtaaattggccgtcataagcgccatcgtaatgatacccatcgctttttgcgcgtcgtttgttccgtgtgtataggattgaatggcagccgtcaaaatctgcactctgcggaagcgtttatttgttttcgccagattgctgtctttaaaaatcagcttcacgatcgaatatacgataaagccgagaacaaaggcgataatcggcgataaaataagtgcttcgataatcttaatgaaccctttataattaagcgtcgcaaaacctgacgctgcaatggccgctccggcgatcgctccgataatcgcatgtgaagagctgctcggaatgccgaaataccatgtgatcaagttccaggcgattgcggcgagtagagccgccagaatgacaactgacccgttgtctaatgtataaggattcacaatgtccttcgtaatggttttcgccacaccggtaaatgtcatcgctccgagaaagttcatgatggcggccatgacgattgcgtgccgcggcttcagcgcttttgtcgaaactgaggtggcgattgcgtttgcggtatcgtgaaatccgttaatgaagtcaaataccaaagcgcatatgacaattaatatcgttaaaagtaatagagtatccattataacccctcgttacgcgtttttcataataatggtttcaaggttattggcaacgctttggcaagagtcggcaatttcctcaagcgtttcgtaaatctcgcggtactgaatcactttaatcggatcggtttctgtgccgaacagattttttaatgatttacggtgcaggttatcacagctgtgctcgtattccttaattttaatggcgtgagggtgaatgtccttcaatcggttttctgcaagcagctcaatcgtgattaaaatttccttcgcgcactctctgatgtatccgctgaacttatcgatatgctcatctgaagaagtgatcgagaaaatctccatcattgctgaaaaatgttcgattccgtcaagcacgtcatcgaggctgtttgtcagctcaaggatgtcttcacgttcaatgggagtgataaaagctttgttcagctctttaatcatgacatgaacatgattatctccttttgtttcaaactcttttaacgtatcggcaaattcctttaaagtcgtctggttcgtcactttaaagttgacaaagtattctgcggtttcgtctatgttttttgcgatttctgttaaaaggagtgagaacttatctttttttctttttatcattaaaaaccctccattgtttgaatgagacaatgcacacatcaaattattatatagccttttgtcgaaaaaaaacagataaagtcgaaaaaaacgcctcttgattttttcgtaaaaacgtgtctcatcctgtttttcttatgttacccacttcgccaaaaaaacgtaacatacttcgaattcagacatcttgcttaaaaagtataacaaaagatgtgaatttgctgtcaacttttgcacgtgattttgccagaaaaaaaacggctcccgtaaaaggaaccgtttttgtcagttttttctgccgtttttcagccaaaaataaagcggcagcccggcgaggccgatcaagagggacagcgcgcagctcagtgtatctgtaatgatcgtgctgatcagcacaaacagtgaacccgcgatggccaaaacaggaatgatcggatacaaaggcacgctgtaggcgcgcggttttccgccgcttttttttctgaggataaacacggcgaaaaaagccatgacgtaaaaaatataaatcatgaaaatagagatctcagacagcttatcgggattgctggcgatcatgaaaataatggccagcgcgatctgaaatgacacggcaatccacggggtgcggaatgtcggatgcacccgcgaaatctgtccggcaaacggcagctgtttccgttccgccatcgcaaacgagacacgcggaaaagcgagaatctttccgtttaaacagccgaagatgctgacgatgattccgacgctgatcaattttcccccgatgtcgccaaacagcattccggcagcggtgccggtcgcattttcaccgagtttgacgatgtcggtcgcaggaagaatgtgcagcagcgcaaagttaatgaaaagataaatggcggtgacgaccaagagtccgcccgtcatcgctcttgggagcagcttttccggatttttcatttcgccgccgagtgccgcaagcagaatccatccgtcataagcaaacaaggtggccagtatggcggcgccgaaattcatttccgacatgctgcttgtgacggctgtgaaaatatgctgatcgcctttccaaaggccgaacacgatcatgcagataatcggaatcaatttgccgacagtcgtaattccctgtacgatgccgccatatttcgttccgataatgttaatgatgcttaaaaataaaacggctgaaatcccgattaatttagaccagccggaatcccaattgaacaagtgcgccatcaaagagccgaaatacaagccgattgctccgataatggcggggccgtaaatgataatttgaacccatccgcacaaaaagccccaaaattcgccgtacacttcttccagatatgtataaagtccgcccgttttcggaatctgagtgccgatttccgcaacggtcaagccgccggcaagcgtcaaaatgcctcctaacagccacgcgataagcgcggttttcgcatcaccggagtaggcaagcacggcgcctggtttcataaatacgccggaaccgatgatggtgccgataacaagtgagagggcgatggtaaggccgatctcttttttaagtccattctcttcaatctgcatatcctttccctccagatgtaaaatcgttatgctgaaaaaactattttccatattgtaaaccctaattgctgaaacacgaataaaataaattttctgattttggtgttttgcctaaaagataaaggtttatgcttttgagaaggaaaaaatactgttttaaaagcgaacattaatggttttttaatatcaaaagttcgttattttgagagcggcagtctgcagaccgtctgtgaagcagatgggttgactttacgatccggataacataaattgtatatataaaatatctcgaaatcgagataattgactggaggataacataatgaaagttaatggaatacaccatgtatcagcattgacggctgatgcgcagaaaaatttagatttttatcgaaatatcctggggctgaagcttgtgaaaaaatcggtaaaccaggatgaaccgacgatgtatcacttattttacggtgatgaatcagccaatccgggatcggaattgacgtttttcgagattccgcggatcgcgccgttccatgcggggacaaacagtatttcttcaatcggcctgcgtgttccggatgcacaagcgcttcaatattggaaaaaacgatttgaagagcatcaggtctctcacggtgagatcgtgaaaatagcgggcagggacacactcgcttttcaggatcatgaaggacagcggcttgtgctgacagctgacgaaaaaggaaaagacatcggtgaagcggtgaagcaaagcggcataccggaagaatattctttccgcggtcttgggcccgttgaattgaccgtcccgtatgcagaaccgacgctgcgtgtgttaaccgatgtgctgggcttcactgaaatcgggaaagaaacacatgaagaccggggcgcggttacggtgctcgaatccggaaacggtggcgcgcgtacagaagtccatctcattgaaagaaacgatcttccgcgcgagcgtcctggaaaaggcagcgtgcaccatgtggccttccgtgttcagaatgaggaggagcttgctttatggcaccgcatcattacgaaagaaggtttcagcaactcaggcattgtagagcgttattatttcaaagcgctgtacttccgggaaccgaacggaattctgtttgaattgtcaacggacggtccgggatttatggttgatgaaaaacctgaagagctaggcaaaacggttgcgctcccgccttatctcgaacaccgccgttctgaaatagaagcgcggctgaaaccgattcagtaaatcagaagtaatgaaagatgccttccggcttgacgggggcatctttttttttgcttttttacccgttttgtcattctttttacctatttgtaaacggcaaaataaatgtctttgtttattaataaatttttcacatttggttgttacacttgttcaaagttaaacaaaaggagtgaaaacacaggtgaaaatgaaaaaacgcgagatagacgcagtcttaatccttattttactcgcttccgcattcttgaatatgtacaacatctggaatgacgatacggtgaatccttattacaccgcagcggtaacgagtatgcttcaaagctttcataatttcttttacgcttcatttgacgcagccggatttatcacggtagataaaccgcctgttacataccagattcaaacgatcagcgcgctgatattcggtatgcacgggtggagtgtcatcctgcctcaggcattggcgggggtaggttcagttctattcatgtacttattaataaagccgacgttcggaaaaacggcggcgcgcatcgcttcgtttgtcatggcgtgtacaccgattgctgtagccgtagcgcgcacaaacaatgtcgatgctttactggtctttttcctcttgttcgccacatggcttctctttaaagcgattcgaaaaggaaaactgatctggcttttggcggcattttttgtcgtcggagtaggctttaacacaaaaatgcttcaggcttatatgatcttaccggccttcttgctgttctatatgatggcggcaaataccgcgattaagaaaaaaatcatttcactggtaagcgcgctggccgtattagcagccgtttcattgtcatggccgctcattgttgacaatattcctgccggcaaaaggccatatgtcggaagcagccagacaaactccgtattggaattggctttcggatataacgggattcagcggctgacggggcaaagttccggcggcggccagggcgggcccgacggaaacgcatcgaaagggatgtcttcttccggcggttcttcacaaatgcaaaaaccggccggccagtcagcaagcggagacaaatcacaaaccggcagtatgacggcacctccatctaacggacaaatgccaagcggcggtcaaggaggccctccaagcggcggagacggcggcaaaggcggtcctggcggaggaaaaagcggtacaggcaccggctcgaaaatgcagtcagggtcaggaatgttcggtacgggaacacccggtccgctgagactcttccaacaagaattatctgatcagatcagctggctcctgccgtttgcgatttttggattggccggtttattgatcgccggggcgagagaaagaagaagattatcagcagaacagaaggaaacgatcttttgggcagcgtggcttgtgccgattgccggattcttcagtgtggcggaatttttccaccattattatctcattatgctggcgcctccgattgctgctcttaccggtgcgggatgggtcgccctcgttcatctgtaccgcaagcaggcgggatggaaaacttggctattgccggccgctattcttgtgactaccggatttgagctgtttatccttaaaaactacaatgatcaaatcggcgcaggctggagcatcggagcaggcgttctcggtgcagtggcggcaatcgccctgttcgtattcaaacagcgccaaaaaccgctcagttactatgtttcacttgcagcccttctcgtcttgatggtgatgccgatttattgggcgagcacaccgcttctgtacggaggcaacagctcattgcctgaaacaggccctcagcttgcgtcagcaggcggaaaaggcatgggaatggataacgcatctgtcaatacaaaactgatcaactatttagagaaacataacgccggagcggattatctatttgctgcaaccgattccaacacagcggcgccttacattataaaaacgaaaaaagcggtcatggcgatcggcggattcagcgggtctgacccggccattacgctgactcaatttaaaaagctcgtaaaagaagggaaagtaaaatacttcttaacatccggaatgggcaaaggcggaaacaacgatattgttgaatgggttgagaaaaccggaaagaaagtatcttcatacaaatggcaatcaagcacagatcagaaaacgaaaaatcatgatgcagctgatacaaaaagcagcaaggccgcgggtaaaaacagccgaatgagcggcgggccgggcggaatgaatcagtcagcttcactatacgaacttcaatctgatgaataggaggaaaaaacatgagcagacatattcaatattcaatagtcgtcccggtttataacgaggaactcgtcattcagacaacctatcagcgcctgaaagaagtcatggatcaaacaaaagagcattatgaattgatctttgtcaatgatgggagcaaagaccgcagtattgagattttaagagagcaaagtctgattgatccgagagtgaaaattattgatttttccagaaacttcggacatcagatcgcgatcacagcgggtatggattatgcagaggggaatgcaatcgccgtcattgacgccgatttgcaggaccctcctgaattaatccttgatatgattgagcagtggaaagaaggctacgatgtggtgtacgccgtcagaacgaaacgaaagggagaaacctttttcaagaaacagacggcttctctgttttaccggctgctgcggagcgtgactgatattgatattccgctcgacaccggggatttccgcctgctggacagaaaagtctgtgatgagatgaaaagattaaaagaaaaaaatccttttgtcagaggactcgtcagctgggtcggctttaagcagactgctgtagaatatgaacgagatgagcggcttgcgggggaaacgaaatacccgcttaaaaaaatgctgaagctttccatggacgggatcacaacgttctctcataaaccgctcaaggcggcaagctatgcgggaatgctcatgtccggagcgggttttctctatatgtttatcgttttatacatgaagctttttacagacagcaccattacgggctggtcctctctgattgtgatacagctgttattcagcggcatcgttctattaatgctcggaatgatcggcgaatatatcggaagaatttatgacgaagcaaaagatcgtccgctctatatcgtgcaaaaagcgtacggtatgaaaaacgaaaagatttatcgggaccagcatatgtcttaacaaacaccctgtccggccagcggacagggtgcttttatgtaaaataaaagccgcgggatgacagaatgtcccgcggctttttttattcatctgcggccggtctgggtgtgcagagagcgcatgatcagtccggttcacgaaaaatttcagtaaaatgcttgcaccaagcgtcattccccaagcagcgttttgctgaggaagctgaatgctcagctgcagcaagatcaggccggtaacgaccagcaaaagtccggtttgtttcatgtgtatgtatcctcctttgtacactgagtcatacggctgatccaggcctaaagtttcatctgtatataaaaaatccaaggcggctgccttggatttttgttaagaagatgtttcttctttttgagtcagtttcatttttttcgtcatttccttgccatttctgataattttcacgtcaacggtgctgccgactttcgtatttttgtagagaatattgcgaagttcgctgcccgtgtcagtttctttcccttttaagctgataatgatgtcttctgcttttaatccggctttggctgcaggtgatccctgcgccacttcacgaatataaacgcctttattcagctgtttgccgaagaggccgagtgtgccttcctgatagttttgcggcacttgttccaagtcgatcatgctcacgccgatataagggcgctccacctgtcctttcgtgagaagctcttcggcaatcggttttacatcgttgctcggaatcgcaaagccgatgccttctacatcattttcactgattttcatgctgttgatgccgatgattttgccttctgtattcaagagcggtccgccgctgtttccgggattgatggcggcatcggtttggatgacgttgatgcttgactcaccggctgacgtagagatcgagacggttctgtttaagccgctcacgatgccctgtgtgacggtgcgggaaaggtcttttccgagcggatcaccgatggcgatgacggattcacccgttctgagagcggatgaactgccgaagcttgccgtttttgttacgtgtttatcactgatttctaatacggccaagtccgtcagcgaatcacggccgacgagtttagctgttacatcggtgccgtcatataatgacactttaagggaagaggcgccttcgaccacgtggttattcgtaatgatatacgctttgccgtttgctttcttaaaaataacgcctgaacccgatcccgtttccgcatcatcacccgatgcattagagtttgaatccgagcttgatccgaatccgaataaatcggaactgctttgctgcttctgcagattggtgattccgacgatcgccggtgaaatgtcttccaccatattcgaaatgctgcttgaatttgccgatgagctgtttgccgatttgccgctgtctgattcaaaagatgtctgcttggcggttaccgatgacgtttcctgagcgggagccggattggaagtatcttgagtctgatggtctccaagcggcgtaaatgtatagatgccgagggcgagccctccgccgatcactccgccgagaagcggtctgaaccagccgaagcttcgttttttcttgtcctcgtccggctcggaatatccggccggctgcgggttttcttttactaaaaggacttcctgttctttttggtctgtccgattttcatcacgatagttatccatcatgttcactccgtttctctatttcatcatagcatgatttgcctattattactgactccatcttaaacaaaaagtgtgggataataatgaaaagattgtgggaaattgtgaaaaagacgaaatcggacggcggcgctttatattgacaatttccatcggatttgaaataataaatgggatattatgttcaatccttcacatgaaaagatataaaaaattctgtcaagctaatgggggaaatctgttagctttttcactttgtcaaatagttaagaaaggagctgtcaaatgaaagaaaaacatcactggatcatttctctgcttgctgtgctggctgtcgggccggggctgatgtcgaataccgctctttcggctgtccaaagccttgtccggcagacggtcggcggggaaaactttgactcttttcatccgattattatcggtaatatggcatttgccttattcgtgccggcggggccgtatttaagaaaaagattcggctcccggcctgtctatatgatttcgatggccgcgggtgtcatcggagcgctgcttgctgctgtgacaaatgatatttatccgctcgccgcgggccgttttttacagggagctgcggcgggcactatgctgatgattatgattccgatgctggtgctttcgtttccgattgaacgccggaattacgccttatttgtgttaatcggcggattttacgggtccgtcattatggggaccgttttaggcacggcggcggcaagcgccggccattggcattggctgttcggcatttttggcctgctgtcttttttcggcctcattttcagttatatgtggctgcgggatgacgctcataaaaatactgaaaaatctccatttgacggcatcggttttctgttagcgggtggatcagccgtgctgaccgcctatacttttattcatctgccgaaatggggcttttcatcatggcagacattggcgggatttggaggaagcatcgtcattctgctgatcctgctgattatgcagtacagaaacgaacatgcgctgatttcgattaaacttatgctgattccaaagccgattttgggtgttttcatgatcgctgcgggcagtatttccatagcggtcagtctttctgcatttcacggggagcttcagaccgcatatcacatgtcacaaactcaactgatattcttatatgcgagccttttgggaggcgtggccatcgccgctgttatcagtgcattagcatatgataaagtcggtccgggcatgctcggcataacaggctctgttatactggtgttcgtgaatttccaatggatgacggcgggtcatcatataccgtttattctatttgcggcgcttttcgtgatgctggcggccgggacagggcttatcgtagcagccggactgatgggcgccgcgttgggcggaccgcttccggaactggtgaaacgcatgacggccgttcagtttttaaggctgttcatttatatgggcgcacctgttttaatagggtattttacgaaaagagatgcttccggcatgcttcggggcgcgcgcggcacacaatcgccgcatgacctgctgatggggacatacagcgatttgtttcttattgctttcatcttaagcttgcttttagtgtgtttatcatttgtcatgaatgcgaccggcatgggacataagctggcgcataaaccgcatgccgtccgtaagcaggcggatgaaaagccttcgccgcaggctcctggaccgatcaggcatcaggtcattcccgatcgcgaatacagaagtgcggtcagacagtttcggggtcaccctataaacaaaaacggtatgtaactttttctatcagcaaacccttttcccggtgaaaagggtttgttttttcccataatggcagaatggtatattgcatgtttcatccttttttaatataatttgttagaatattcataatttaatatcgaaattttaaataaaaaaggaggcattacatgaaactgtatctatctgtggatatggaagggatttccggactgcctgatgaaacatttgtcaattccagcatgcacaattatgagcgcggcagggttctgatgaccgaagaagcaaactggtgcatcgcagaagcgtttaataacggatgcacggaagtgaccgtgaatgacagccactcaaagatgaataatctgctcgcggaaaaacttcaccctgaggcagagctgattacgggggatgtcaagccgttttccatgatgcaggggcttgatgaatcgtattcaggtgtgatgtttatcggctatcatgcgagagcgtcgatgccgggcgtcatgtcgcacagcatgatattcggcgtccgccacttttacataaatgataagcctgtcggtgaactggggttaaatgcctatctcgccggattttacgatgtcccggtcatcatggctgccggagatgattgcgccgcaaaagaggcggaggagctgatcccgaatgtgacgactgccgccgtcaaacaaaccatttcaagaaccgcggtcaaatgcctgtcccctcaaaaagccggacggctcctgacggaaaaaacagcctatgcgctcaaaaataaagataaggtcaaaccgctgactccgcctgaaaaacctgtattaggcattgaatttgccaattacggacaggctgaatgggcccatttaatgccgggcacagaaatcatcccgggaacgacaatcgttcaatttcaggcaaaagacatgccggaagcctatcaggccatgctcgtcatgacagaactcgctatgagaacaacattctgttaaaggggtgaacggcattgctgcggtattttatcaaacgttttatcgccatgattatgaccgtcctcgtcatcaccactctgacatttgtcatgatgaaagtgatacccggctcgccttttaacgaagagcggggcacaaacgaagcggtccagcgaaatcttgaatcctactaccatctgaacgaacctcttatcactcaatacgccatctatctaaaatccattcttacctttgatttcggtccttcaatcaaaaaaccgtcagacagtgtaaacgccatgcttgaacgcggatttcccgtctccttcgagcttgggataacggcgatcatcatcgctgtgatttccggactcgcgctcggcataacggccgctctcaggcgcggcggctttctcgattatgcggccatgagccttgcggtgctcgggatttccattccgaattttataatggctacgctgctgattcagcaatttgcggttcatctgaaatggtttccggcagctacctggacgagtcccgttcacatggttctgccgactgttgcgcttgccgtcggtcccatggccattatcgcgcggctgacaagatcaagcatggccgaagtgctgactcaggattacatccgcacggcaaaagcaaaggggctttctcccgtcaaaattgtgatcaaacacgcattgaaaaacgcacttatgcctgttgtgacagtactcgggacgcttgccgcaagtattttaacgggcagtttcgtcatcgagaaaatttttgccataccgggaatgggcaaatatttcgtagaaagcatcaatcagcgcgattacccggtcatcatgggaacgaccgtattttacagtgtgattctgatcgtcctgctgtttctggttgatttggcatacggcctgttagacccgcgcataaaacttcataagaaagggtgatcctgatgaatctcccgcaagaaacggtaaaacacacagaagtgcctgatgactggtttcagccgggcgcggaaagaaagggtgaaaccgagtcggtcaagcgtccgagcctgtcttacagtcaggatgcgtggcggcggcttaaaaagaacaaattggcgatggccggacttgtgatattatgctgcctgtttctatcggctgtgttcggcccgctgatatcaccgcacagcgtgacaaggcagacgctcgccgagcagaatcttccgccttctttttcacactggttcggaaccgatgaacttggccgggacgtgtttacaagaacgtggtacggagcgaggatctctttatttgtcggtgtgatggcggcgctgatcgactttttgatcggcgttatctacggaggcgtcgcgggctacaaagggggccggacagacagcgccatgatgagaatcatcgaggttctctacggtttgccttatctgctcgttgtcattttgttaatggtgctgatggggccggggctcagttccattatcgtcgctctgacagtgacgggatgggtcggcatggcgcggattgtgagagggcaggtgctgaggatgaagcatgatgaacacgtattggcatcgaaaacgtttggagcgaaaacatttcggatcattaagaaaaatctgctgccgaatacgatgggagccattattgtccaaatgacgctgacggtgccggcggcgatttttgcggaatcatttttaagttttctcggactcggcattcaggcgccgtttgcaagctggggagtcatggcaaatgacgggctgccggcgattttatcaggccattggtggcggctgttttttcccgcttttttcatttccttaacgatgtacgcgtttaacgtgcttggagacggcttgcaggacgcgttagacccgaaactgaggaggtaggaaaaatggcgcagcaagttctttccgttcaaaatctgcatgttactttttcaacatacggaggcactgtaaaagccgtaagaggcgtcagcttcgatttatataaaggtgaaacgtttgcgatcgtcggtgaatcgggatgcggaaaaagcgtgacgtcacaagccgtgatgggtcttcttccgaaacattcggcaaagattgaatccggaagcatacaatttaaacagaaagacctttgccgaatgtcggatcgggaaatgcggggaatccgggggagcgatatttctatgatttttcaggacccgatgacggcgctcaatccgactttgaccataggggatcagctctcagaagcgctgttggaacaccgcgccatgacaagaaaacaagctgaatccgaggttctcgccatgctggatctggtcggtatcccggactcgaaatcccgcctgaagcagtacccccaccaattaagcgggggcatgcggcagcggatcgtgatcgcgatggctctgatctgcgagccggaaattatgatcgccgatgaaccgacaacggctcttgatgtgacaattcaagcacaaatccttgaattatttaagaagattcaaagaaaaacaggcgtgtctattattctgatcacccacgatctcggcgtcgtcgctcagaccgccgacagagtcgccgttatgtatgcggggaaaatcgccgaaatcggcacgaggcatgatattttttaccgtccggctcatccatacacaaaggggctgcttcgttcagtgccgcggctggatatggaagatagtgagctttcgccgattgacgggacgccgcctgatttattcgatccgccgccgggctgcccgtttgccgcccgctgcccggacaggatgatcgtctgtgaaaaggtatacccggcaacaaccgtgaaatccaaaagccgtatcgtcagctgctggcttcaggatcaccgtgcagagcggctgaagcagcagctgactgcagcagaggaaaaagggggattgaaatgaaaaagagatgggcgattggtgtgattgctgttgtttcgtttgctctgatgggctgtacagccaatgaacaggcggggacagaacccggcaaagcaaaagaacaggggggagagacggtgctgcggctcaataacgaaaatgagccgacctcacttgatccgccgatcggatttaataatgtttcctggcagccgctgaataacatcatggaaggattgacgaggctcggaaaagataataagcccgaaccggccatggcggaaagctggaaggtgtccgctgataagctgacatataccttcaatatccgagataacgccgaatggacaaatggcgatcccgtcacggcggaagacttcgtgtacgcctggaagcggatgctcgatccgaaaacgggcgcatcttccgcttttctcggctatatgatcaaaggcggagaagaatttaacagcggaaaaggcaaaaaagaagacgtgaaagtcacggcaaaggataaaaaaacgcttgtcgtcacattggcggccccgcaggattattttttgagcgtcgtgtccaatccggcgtatttcccgattaatgagaaggtcgccaaggctgatgcgaaatggttcactgaagcaaaaacttttgtcggcaacgggccgttcaaactgacggaatggaagcatgacgacagcatgacgatggtcaaaaacgagacgtattgggataaaaagacggtgaaactggataaagtgacatgggcgatggtcagtgaccggaataccgactatcagatgttccagtcgggggatttggataccgcctttgtgccggcagagctgagcgagcagctgatgggaggaaaaaatgtccgcacgtgggatcaggccggactctatttctatcgttttaacgttaaaatggagccgtttcaaaatgaaaagatcagaaaagcgttcgcggcagcgattgatcagaaagaaatcacggattatgtgaccaaaaacagtgaaaagccggcacatgcctttgtatccccgggatttactcagcctgacgggaaagatttccgcgaagcgggcggcagtttactaactccggatgaatcagaagccaaaaaactgctggaaaaaggcatggcagaagagcattatgacaagctgcccgccgttacattgacatacagcacaaaaccggagcataagaaaatagcggaagcgattcagcagaagctcaaaagtgtgctcggtatagacgttaagctcgccaatatggaatggaacgtctttttagaagagcagaaaggactgaagttccagttctctcaaagctcatttttaccggattacgcagatccgatcagttttcttgaggctttccaaacggataattccatgaaccgcaccggctggggaagcgcggcatacgacggctgcatcaagcaggcaaaacaggaagccgatgccaaaaaacgttttgcgctcatgcataaagcggaaaagctgctcatgaacgaggctccgatcattccgatttacttttacaatcaggtgcatctgcagaacagcggcgtgaagggcattgtccggcaccccgtcggttacattgatctgaaatgggcggaaaagtcctgatcttacagcggaaacatatgccgctcttttgccgttaaaggagcggcgtgtttcacttttcaatccggaaaggagattgaaaaagtcatgaaccataaaccgaaagcactgcaaaaaggcgacacggtcggtgtgattgcacccgcaagcccgcctgagagcgggacgctgcaaaccgcgctgctgtttttagagaatgagcttggccttcaagtgaaactcggccgggcgctgaagacccgtcacggctatttggcgggagaagaccgggcgcgcctcaatgatctccatgacatgtttagtgatcagaatgtcaaagcggtgatatgcgcgtgcggaggattcggcacgggccgcattgccgccgacatcgatttcggcttaatccgccgcaatccgaaaattttctggggatacagcgatattacgtttttacataccgccattcatcaaaatacggggctcgtcacatttcacggcccgatgctgagcacggatgtcgggcttgaagatgctgaacccctgacaaaagcgtcgtatcatcagctttttacagaaacggaattcacctatacggaggacatttctccgctggaggtgctgacaggcggaagggccgagggagagcttgcgggcggcaatctgtcgctcattacgtccacactcggcacgccgtttgaaattgatacgaaagacaaattgctgtttatcgaggatattgatgaggagccgtatcaaatcgacaggatgctgaatcaattaaagatggccggaaaactgtcagacgcagccggaatactggtctgtgattttcaccaatgcgaaccgaagcataaagaaaagtcgcttactttagagcaagtgctgaacgattacattgtcaaatcagggaagcccgcgctcaaaggctttaaaatcggccattgttcaccgagcttcgccgttccgatcggagcccgcgcggttatggatacggcggccaaagcggtaacgattgaatcgggggtttccggaagggagtgatcaggcgtgaggattacagatattcaaacgggacggatgtccgtgccgctgaaaaagccgtttaagaccgctttgcgcacggtttacaatgctgaatcggtcattgtgaagctcacatttgacaacggtctgaccggctggggcgaggcgccgccgacggttgtcattacaggcgacagcacggacggtattgaaagcgccgtccgcgatgtgctgaagcccgctctcttggggcggagcctttccggcatagaagctgttttgtatgatatcagccggctgttggaaagaaatcaaagcgcaaaagccgcggtggatatggctgtatatgacggatgggcgcaaatgcacggacagccgctttaccggcttctcggaggctatcggaatacactggaaacagattttaccgtcagcgtcaattctcctgaggagatggcgggggatgcagaccgctatgtgaacaaaggatttcatattttaaagataaaagtcggcataggtgacatatcggacgatgttgcccggattcaggcgatcagatcacgtgtcggcggaaacgtcaaactgagattggacgccaaccaaggctggacgccgaaagaagccgtgactgcgatccgaaagatggaagacgccggcctcggcattgagctggtcgagcagcctgttcataaagacgatatcgccgggctgaagcaggtcaccgatgccgtagacacgccgattatggcggatgagagcgtctttactccccgtcaggccttttgcgtgctgcagacgagaagcgccgatttaatcaatattaagctgatgaaagcgggcggcataaagcaggcggaaacaatcaatgcgatggccgaaacgtgcggcgtggaatgcatggtcggcagcatgattgagaccaagctcggcatcaccgccgcggctcattttgccgcgggcaaacggaatgtgacaaggtttgattttgatgcgccgcttatgctgaaagatgatttgattaaaggcggcatcacatacagcggcagtcagattacgattcccgatgaaccgggtctcggcattaccggggtgtcgaaacaagaggaggcgaaaagatgagagcagccgttacagcggcggcagccaacgtatggacgatgccgtcatctccccgttcgtatgatgcgccgatgcttgaaaacccgccgcagatcagaaaatggttagcgtctatgggatatgaagagcggctgcaattatgcacagacaaccttgtccaaacgcaagcgcttttcggggaagaggtgatcattctcaaagaggaaggggaatgggcttttgtcgccgttcccggccagccctcaaacaaggatgcgcgcggatatccgggctggataaaaaaaagccagctttcaaaagacggctttttttcatcttcgcccgccgtatggattaccaaaccgacagcttttttatatcacactaacggcgaaccggacttggaagtaagtttcttaacgcgtcttccggcatcaggacgtgagaaaggcttttttcgggttgtgacgcctctcggagaacggttcgtaaatgaagctgacgcagacgagtgccggcatacggaaggacgggcggccgaggtcatcgaaacgggcatgatgtttctcgggcttccgtacttatggggaggactgagcggtttcgggtttgactgttccgggtttatgtattcgatatttaaagcaaacggctatacccttccccgtgatgcaaaggaccaagcaaaagccgggtgcggcgcggcggtaaacgatatccggccggctgaccttttgtttttcgcctatgaagaaggaaaaggcgcgattcaccatgtcggtttggcgctgggagacggccgaatgctgcactccccgaaaacgggaaaaacaatcgaagtgctgtccttggaaggaacgatctatgaaaaagaattatgcaccgtacgccgctgtataagcgaaaagggggaatagaaaatgacggcatctccgctccttgaagtcagcgggctgaaaatgcattttgacgcaggaagaaagaaagccgtaaaagcagtcgacggtgtcagctttcacattaaaagaggggaaacattcggacttgtcggagaatcgggatgcggtaaatcgacgctcggaagagttattctccgtctgtatgacccgacggccggttcggtatcatatgaagggacggatatacaccgtgccgcggccgaacagcggtcggtcttcttccgcaagctgcagatgattttccaagacccttacgcctcgttaaatccgcgtctgaccgtaagggaaattattatggagccgatggaaatccacaatctttacaatacaagaaaagcccgtatgatgatggcggatgaactgcttgaagctgtcgggctccatccggatttcggcagccggtatccccacgaattcagcggcggacagaggcaaagaatcgggattgccagagcgctctctctgcatcccgaatttatcgtggcggatgagccgatttccgcgctggatgtgtcggtacaggctcaggtcgtcaacctattaaaaaggcttcagaaagagaaagggctgacatttttatttatcgcccacgatttatcaatggtcaagcatatcagcgaccggatcggcgtgatgtatttgggccgcatgatggaaattacagaaagcgctgcgctttaccgggaaccgcttcacccttatacgaaggcgcttttatcctcaatcccgattcctgatccgcttcttgaggacaagcgtgaacggattattctgaaaggggagctgccgagcccccttaacccgccgagcggctgtgtattcaggacgcggtgccctgaagcgatggagctctgcggtaagataacgcctgagcttgaagaagtgaaggcggggcgttttgtcgcctgccatttatacaaaaaagaaagctgacaatataaagtcagctttctttttgattaaatctgatgcagaaatgacacgcagaccggatacggaaccggaatgtcggattgaagcagagtcaatttgcctgtttccggatcacgttcaaacaaaaccagatttcccgtttcttcgtttgacgcgacaaggaatgtctcggaagggtcaaacgcgaaatcacgcggccagttgccttctgtcggcacccattcaataagagacaattcaccggaatattggttgatcttaaagatggcgatgctgtcatgtccgcggttggcggcataaagaaatctgccgtctttagatatgcggattgcgctgccttgcgatttgtccgtaaagccttcaggcaaagcggaaatgacctgcagctctctgaattcacctaaggtcgggttgtattcaagcgcgatgacttcattgctgatttccgtcatgacataggcgtatttttccgccggatggaaaacgatgtggcgcggccctgaacccggtgcgaaagagtgagttttcacctctgtgagcgaaccgtttttcatttggtacgtatacagcgtatccgtccctaaatcgacggctgcaatgtagttatgctcaggtgtatagccagcgaaatgggtatgcggtttctcttgtctttcatgaggacctgttcccgtatgagcggcttcggcagccggctcctgcagacttccgtcctcattgacgggaaaggcgtgcacttttccgctgtggtaattagcggttaacacatattcatgtttatcatcaatgctgacgtggcatggagacgggccttcaatcagctggtggtttacaaacgttaattccccgctgttctgatgaatctgataggctgcgacgccgccttttccgtctgctttttcaatggaatacagcatgctgttatcagaattcggagtgacgtatgtcgggttgccgagctttgctgccagcttcggccggctgagccttttcgcttctgtatcaagttcaaaacaataaatgccttcgcttccgccttttgtatatgttcccgcgtatcctatgtacttagccattcggtttccccctttagagtcttgtcttctctatattaacgtatcttgaaggaaactgccttgtaaatgtttaagatgttctggcaagcggcaaggtgcagcagcggaaggaaccgcctgatttgataatttcggaaaactcggtttcaatgaccgtataacccctttttctgagctcgcggttcgtatgacggtgctgcggcaggctgataattgtctgattgccgattgacaggatattcgggccgagcgtgaattgctcttcttcaggcacttctatcatctcaaaacgttcggcgagaagatcaatttctttctgccgcaagccatttttacagtatagcgcttccgtttccgagatcatattaaatacacagtccaaatgtaagaaatcctccttgagagggatcggcacaacagtcatctccggcagcgcctcccgcagctcccggacagccgctttatccgtacgcttgctcagcccggcgtaaacggtgccgtctgcgatcaagatgtcgccgccttcaatgttcgcttttttcagtcgcgtataagggattttcttatcgtcaagcaggtcttgaaacactttttcttctccctgccggactgaagccgccatgtttgaaataaacgctgtctcgcctaagacaaatccgatatcccgggtgaatacctgctcaggcaaagcgggatcggcaggcagcaggacgacttcaatctgatgagatcttaaaatgtcaataaactcactatgctgtttgagggcaacgggtatgttaatattttcttgtttgaaatgtttctgcgttccgttaataatatccttgatggtcatgtgttccggccggcataagatgactgtctgcaaagcatcaaactcactgcggcaagccggtttccgcgtggatttgggtatggatacgtccatgtgatatcctcctatcggtattcaatgtgcgtttattattcccggatgtgataaataatgaaacatttctgatagaatatctaaccaacttaatatttaaaattttagacaaaacgatcaaagtattgtttaatagggtacagatgaaatgtcaaaacgaccagacaccaaaggggagtttaaataatatgaagttgccagaatcaagattttgcaaagaaacaagggttgtcaagacaagcagggtttttccgcttgatacgaataatcacaatacgctgtttggcggaaagctgatgagctatattgatgatatcgcttcaatttccgcggcccgccactgccggtgtgaaacagtcacggcctcaatggattctgtggattttttgcgcccgatcggccaacaggattccgtatgtcttgaatcctacgtcacatgggtcggcacatcgtctatggaggtgtttgtcaaagtcattaaagaacatctgatgacgggtgaacgcgagcttgcggcaacgtcgtttctgacattcgtcgcgctcgattcaaacgggaaatcggtgcccgttccgcggatcgtgccggaaaccgaggaagaaatcatgcttcacaatacggccgttcagcgcgccggagaacgaaaaaaccgcttaaaacacagcaaggccctggccgaggcgctcggaacagataaaccttggtaatcgtcaaaccgctttttttaaaagcggtttttttatgctgaaaaaggacttttcctgccgggtccataatttattacagggaaaggagacgtggcgtgcatgatgaaacataagtcttccggcaccatcctgacaaccgggcgtatccgtctgcggactatgcgggatgacgatgaagacaatttgtacgggctgtttaccgacagagaggtcatgaaatattatccttctcttaaaagcagacgggaaacgaaggaatggattgcctggaacaaacgattggccgcaggatacggcgtcagtctttggatcgcagaggataaagtgtcgggtgcatttctcggtcaatgcggaatcgttccgcagacgataagcggaaacactttgatggaaatcggctatatgtttgcccgctgccgctggggctgcggctatgcgacagaggcggcgaacgcctgtctggactacggttttcatacgcagcaatacggacgcatagcggcgctgattgatccggaaaatgctgcctccgtccgcgtcgcggaaaaaatcggcatggtgcccggtgagaccgttaccaaatgggagaggcggctgacggtatttgacatcacatctgacgttgaacgtttcggcgaaatgtagtatgatacgaacagacatgttttctagggttccgcatgttcatacatggcctggtccgagagaaaacacatatgcggacatatcccgcatatgcacacggagggaaaaaagcccgggagagtcaatctcatgtgagacgactattccgggctttttgtattgcccggaaacagaaaggatgaagaacatgaaatggggtttagtggtcatagcggccgtatttgaagtggtatgggtcaccggcctgaaacatgctgattcggcactgacgtggggcggcacgattacgggaatcatcatcagtttttatctattaatcaaggcgacggacagcctgcccgtaggaacggtatatgcggtctttaccggactcgggacagcgggcaccgtgctcagtgaaatcctgcttttcaaagaacaggccgatccggtaaaaatcgtgctgatcggcgttttgctgatcggtgtcatcggattaaagctggtcacacaggataagcctgagacgaaggaggagaaggcgtaatgcattggatcagcctgatagccgcgggtctttgtgaaatgctcggggtcattttaatgaatcaatttcaaaaagaaaagaaagtcaagtggatttttttcattatcgtcggatttgcggcttctttttccctgctttcttatgcgatggagacgattgcgatgggcacggcctatgcgatctggaccggtatcggcacggcgggcggcgcactagccggcattcttttctacggcgagcagaaggatgcgaagcgcatctttttcattgcgcttattttgtgcgcagccgtagggctgaaaattctttcgtaaattgatttttatcaaattttcagtataatctataataagttacgaattatgaagatacgagggattaaaacagatgaattcatatatgacacagcggctgaaagaataccgccgcggtaatgaggaaaaagggcgcctgcttgtcagctgccccgatcagccgggaattgtatcggctgtttccgcgtttttgtttgaacacggcgcaaatattattgaatcaaatcaatatacgactgaccctgaaggcggacgtttttttctcaggatcgaattcgactgcaagggcattcgtgagaaaaaagaggatttacagcaggcgttcgcctcaatcgcccagacattcggcatgacatggagcctctctctggcaagtgagctgaagcgagtggcgatctttgtatccaaagagctgcactgccttcatgaactgatttgggaatggcaaagcggcaatatgatggccgaaattgcggtcgtcatcagcaaccatgaagaggcgaaagaagtggtcgagccgctgaatattccattccattacatgaaagctaacaaagatatccgcgccgaagttgagcggcgccagcttgagctgctggagcagtataagattgatgtgatcgttcttgcccgctacatgcagattttgacgtctgattttgtatctgcccatccgaatcggattattaacatccaccattcatttctgccggcctttatcggcgctaatccgtataaacgggcttatgagcgcggagtgaaattaatcggcgcgacctctcactatgtgacggacgatcttgacgaagggccgattattgaacaggatattgaacgcgtcgatcacagagatcacgcagaggatctgaagaatatcggcagaacgattgagcggagcgtgttggcaagagccgtaaaatggcatctggaagaccgtgtcatcgttcacggaaacaaaacgatcgtatttaattaatgacggtccgccggggaggcgggctgttttttatggatgaaaatgtcttgacaagaacctgttttctttgcataatataaaaaaatcattgagcgttgaagaggatcagtacgcagaactttctgtgacagagagcaaaatggcccgctgaaacattttgccgcatgaaacctgccgaacctgccttggagtcctgaggggaaaactcaggcgcgatacctggcgttacaggaaagcgggacgcgtgaaaaacgcgttcaaacaaggtggtaccacggaaagcccatttcgtccttatttttcaggacggaatgggctttttttattgacgagagccggtttggattgattgccacggaggagaaacgatgaaaaaacaaagaattgttgtgaaaatcgggagcagctcgctcaccaacagtaacggaagtattgatgaagcaaaaatcaaggaacatacggaagccatttctttattaaaagaaaacgggcatgaagtgatcctcattacctcaggcgcggtggcagcgggtttttccgctctcggctatccgtcgcgacccgttacgataaaaggaaaacaggcagctgccgcagtcggccagacgcttttaatgcagcaatatatggaccatttaaaaggatacggtctgacgccggcacaaattttattaacaagaaatgatttctcaaaaagagagcggtacagaaatgcctatgccactgtaatggaactgttggagcgcggcgtcgtgccgattattaatgagaatgattccacatcagtcgaagagctgacgttcggtgataacgacatgctgtcggcgcttgtaagcggtttgattcatgcagaccaattaatgattctcacagacattaacgggctgtacgatgccaatccgaatgaaaacccggacgcaaagcggtttgactatctgaatgacatcacacctgaattgctcggatatgccgggtcagcaggctcaaaggtcggcaccggaggcatgaagtcaaaacttctcgccgcccagaccgcattgtcgctcggggtgaaggtgtttatcggaaccggctccggacgtgaaaaactgatggtgattttaaacggaaaaggcgacggcacttatatcggcgataaagacctgtcctcagtgaataatacacggcaatggatcatgtttcattctccgatatcaggggaaatcatcattgatgggggagcggagcaggcgatgatccataacgggtcaagtctcctcccggccggcgtcgccgatgtctgcggcagttttccgaaaggagccgtagtggaagtcagagggcccggcggcattatcggcaaagggcagacacagtactcatccgatgaaattttagaagccaaagggaagcggagcgaccagctttcaggaacgaagcaggtggaagtgattcacagagatgattgggtgaatttatttgacaagggggaacacaaatgagtgaagtattgcaaaaagcggctttggcaaaagaagcggctgccgaaatggtcatgaaaacgacggctgaaaaaaacgaagcgctccaatgtattgcagacggactcagaaatgaacggcagctgattttaacagagaatcagaaagatattgaagcgggacggaacagaggattgacacctgacattattgacaggctgacgcttgatgaaaaacgcctgctcgatatcgcggacgccgtggaactgctaatcggtcttgaagatcccgtcggtgaatcattggagaccattaaaaaagagaatggattatcaattgaaaagatccgcgtgcccctcggagtagtgggcatgatctatgaggccagaccgaacgttaccgtagacgcggccacactctgtctgaaaaccggaaacgcggttgtgctcagaggaagttcttccgccatccacagcaacatagcgcttgtcagtgtgatgaaacgcgcacttgggctgtcaaagcttccgattgatgccgttcagctcatcgaagatacaagcaaagaaaccgccaaacagctctttacattaaatgatgggctggatgtattgatcccgcgcggcggtaaaaatttaattgatcttgtggtcagggaatcaaccgtacccgttttagaaaccggagcgggcaattgccacgtgtacatagatgagtcagcagatccccttatggcaagcgaggtcgtcatcaacgccaaaacacagcgtccttcggtctgcaatgcgattgaatctcttctgattcatgaaaaatgggccgaagaacacggacgaaagctgctgaatcagctgacagaaaaaggggtggagctccgaggagaccaggtgatttgcggactggagcctcaagcgaaacaagcagaagaagccgattggggagcggagtacctggcgcctattctcagtgtaaaaacggtgcaggacgtacaggaggcggtccgccacattcagcagtacggcacaaaccattcagaagccattctgacggagaacgccgagcatgcggcttacttccagaccgccgttgacgccgccgccgtgtatcataatgcttcaacccggtttacggacggttttgaattcggatacggagccgagatcggcatcagcacgcaaaagcttcacgcgagagggccgatgggacttccggcgttaacatctacaaaaatcatcatcaaaggaaacggacaaatccgggtataatcttttaagcttatccttcaaaaagggtaagctttttttatgcggaaagattgacggtttccattatatttcgtaaaattaaattgtacacaatataatagaggtgaatttatatgacaaaaccattatttactgcaaccgtttcagccgcaggcggacgtgaagggaaagtcacgtcttctgacggggtgctgaatcttgatgttgccatgccgggaacgccaagagcaaaaaagctcgaacaagccacaaaccctgaacagctgtttgccgcaggatattcagcctgctttgacagcgctcttcaactcgtagcaagaaaagagcgtctgagtattgaaacagaggtcactgcgcatgtcagtctgctgaaagatgaaagcgaccaaggatataaactcggcgttacccttgaggtcaaagcatccggcattgagaaacaggagcttgaagcccttatccaaaaagcgcacggtgtgtgcccgtattcaaaagcgacagcgggaaatattgaagtgaagcttctggcagcagaataaaaataaggatgcccattcggggcatccttattttttgccgtgcagcgttttcaaaacctcataaagcgactgttttacctgctttaattcctcttttgacagtcccgtctgttccagcatggcaatggggatatctgccgctgtattctgcaaggcccgtccttcatctgtgagcctgatcgtcacggatcgctcgtcttcagccgaccgctttctcatgatgattccgtgctgctccatccgtttcagcatcggtgtcagcgttccggaatccaggtgcaaaagctcacccatccgtttcacattcagttcttcgtgctcccataataaaagcagcgccaaatactggggataagttacgttgagcttatcaagcagcggtttgtaccgtttcgtcatttcccttgagcttgcgtacagcaaaaaacaaagctgattctccagtttcatatgttcaaaatctttttctgccattctttcaccaactcttttttgttaacgttacccctattgtagccgaaaaacggcccatttcctattgcaatcatgtttaaaaatatgagcaggggcaatatatacagtaagtacaatgaggaggctgataataatggcattatttacttcaaaagcgaccgcagtcggcggacgagcaggacatattaaatccgaagacggggtgctggattttgacatcatcatgccgaatgcaaaaaaagacggagaaaccggcacaaaccctgaacagctctttgcggcaggatatgctgcctgcttcgggggagcgcttgaactcgccgcccaaaaacaaaaaatcgacatgacctctgaaattgaaggacaggtcagccttttaaaagatgagagtgacgggggttacaaaatcggcgtaacgctcgtcattgatacaaaagatcttgataaagaaacggcggagaagctggtgcacgccgctcacgagttctgtccgtattcaaaagcaacaagaggaaatgtagacgtcaaacttgaattgaaataaagaaacgaacgaatatcccggatttcatatccgggatattttattaacgaaaacatcagtaatgatctcttctctcccggaataagaatacgatatagcacttttgcataatgacaccaagagaaaagagggagaaatcgatgactcttccaaacataccgaacatcacccccgacattacactctccagatgtgagaccctgaacctccttctttcatccgtggctatggaagaaatcggactatcccatattctgcaggcggaagcggaaaggattcaaatgtttctcagcgcttccggcgatccctccttaggggaattatcatcaatcaatagaagcactgaacggctcctgcgcaccgtcatgaaatcacaactccttttgcagacgaagcttgaagacattatctacttacaggatgctgaagcctgtatagacccggacgatccaagtaatccgagtgatccaggcgatcctgatgacccgtggaatccggacgacccaagtaatccgagtgatcccggtgatcctgatgacccgtggaatccggacgacccaagtaatccgagtgatccgggcgatcctgatgacccgtggaatccggacgatcccagtgatccggaagatccgtgtgacgacctgttttacggccgtattggctgctgtgagtgcggggattgtgaggactgcgattggaagaaaaaaggcggggagcgttcataaaaaaagagacgggtgaagcatatgccgtatccgagcatctcaaaagcgaaacagacatcttttgaagccttgcattgtctcacgatggcgctgttaaatatattatctgtgaccgtggataaaagaaggggttcaaattacaaagaagaaatcaggctgttctccgcattgtgccgctggcagatggaaacgggcggccggctgtttttaatgatcagcttggaagaagaacagaagcagatgtatgcgcggcactttcatgaaatgaagacagtgacggaacgaacgaaaaaattcatttgtgaaagcccgcgcgaattccgggcgcatcccattacgaagcgggctgtcaggcagcttcaggaatgggatgcagaatcaactgccgaacctgccgtcagatgggtgcggcctgtcatcataacgatgaacggcactcctggacggccttggttcaatcaacaactccaaaatcgggaaaggtgagaaaatgagcggaaatgctgaatgtaaactgactctttgcatgattgtgaaaaacgaggagagatatatctcccgttgtttatcaagtgtacaagacatcgctgatgagatcgtcatcgcagacaccggatcacaagataatacaaaagatatatgtaaaagctttcaggcaagagtgtttgatttcgaatgggagaatgatttcgcaaaggccagaaattacgccctgcagcatgccgaaggggattggattttagtgcttgacgcggatgaagagctcgatcaggagacgggccgttttttaacttctctgcttcatgacggattaccgagccggggacttttgaaaatcatcaattatacggggaagcagctcgatgaaaacgaagcgtttgaaagcatgcagccgaggctgttccgcaatcataaaggccttctgtatcaaggcagaattcacgagaatatctcggctcccaatgaggaagaaaacaatgcttttttcacgctcccatgtgtgattcatcactacggctacttggagcaggaagaaaaaatcaaacaaaaacataaacggaatatcagcatattaaatgaagaactttcagaggaaaatcctgatccgtggctagtctatcatctggcaagtgaatgttacagaataaaagactatgaaaaagcattacatcttgtcaacggctcaatatttcaatttttaagtgagaaacgaatgcctccgtctcttctgtattttctaaaatatacaatattgcttgagctcaagcgatatgaagaagccgaacaagggattgaaaaagtgctcaagctttatcctgattacagcaatcttcattattataaaggccttgtattatatcatttggaaaagtacagagcggcaatcaaagcatttgaagccggaacgcaggttgaaggagaaaacgctgatcacttcattttaaaaggtgccgccgatttcagagctttttattatatggcgaaatgccatgctgcattaaaccatgatatgacggccatcgcttacgccaaaaaatccgtgaaattcaatccgcaatttaaacccgcgcaagaacttctgtctcaattaaaaaaggatcagcggacaaacgcctgatcctttttttgcatgttccattaagataatcgaataatgtttaaagctgcgccggcacttcctctaagcaatgtggccgcacccaataatccgaacagctggagctgaatggtgctgcctgctgtcaaagtcacaataaaggagttattgaagtttgccaaagacgcgaccggagcaataatcgaacttgcagccggagtgccgttgattaagatgcgcgaacttactagcaggccggccgttaaattaatatggtaggaaatatagtaccgtcctgccggagcaacggtgaatacagtatttgcggcattagcggtaatatccgctgagaggttttgttcattcggtaaggaaatggccgtgccgccgttaataactgcgacaacaccgccgcccgtattgctcgcatagccggaagtggctgtcagacttgttccggtgcttcccggaggccctgtaatgccggtagccccggtaactccggtcggtcctgtaacgccggtaattccagttgatccagtgccgccagtagccccggtaattccggtccgcccggttgaaccagtagcgccggtgcttcccgccgcagctaaaagtgtatagtcagctgaggtttcaggggttcccgacgggctgtttacgtttgcgacataagagctgccgttatacaagacaacctgtccggtcgtgtaagtaggggcgatcagcggattaaaagcaacaatcccttgaagacccgcacccgtggccccgtcggccccgtggcccccgtcggtcccgccaatgtagggatatttgagatactgtccaattttgaaccgagaaggagctcctgtttcattaagctgtcaagcgtatcccggacgctctcattcaggttaagaatatccgcaagacttgacgggggtcctgttaatccgggaatcgttccgagcgcgtattggattttttccccttccgcattcagaatatgtgccattcccagctcttccatagcaattgacgaaagaagaaggttaatggtatcgtctctggaaagtgtaacgacaggggtgatattgggcatattaggctgtgacacaatgtccctccttatgagttggctgaaaatcattttattgcgaacaaagttcccccaaatgagcgtaagcagtactgtatcattatattcactgattctgtccaagtttctgaacgaattcccttcattaatttcatcatatatgaaggaaatactttaaatatagagaaaatacatcgcacagcattcacaaaatcggtcaaaatgacagcgggacatgtgatcgtctataaagcgatggctatatatcttgtgcgtttcctgcaaaaacgctctttttcatttcaagttttctgtataaaagggcgagaagcatggacggtatcgtacaaacaatcattccgataaaggcataccggggttcaatttcatataaaaaacctccgaaaatagtaaataccgcagtgctccagctgagagcaagcgctgaatatataccttgggctttcgggatttgcgcgggtgaaatatttttaattaagtatttcataaatgcatagtgtcccatcgcgaatgaacaggcatgcagcgtctgcgcaagacagaaaatgatgacatgcggaaaggcaaatacgagtatccagcgtacggtagcaccaagcgccgccagggcgagcaaagagcctgccgtaaattgatgaaagtatcggtcagcgattgcaaagaagataatctccgtgataacggcgatgttgatgatgattccgatggcatatgcgggcgcatcgatttcctgcaaaaagagataaccgtaattgtagtaagatgcatgtgccgcctgcagtaagataacgattgcgagcaccagaccgaaatatttgatgcggaataaggcaaacatgccctcttttcttgcacggtctgtttccggccgttttgaaagaacagctggcgcatgcataaagcttagggatgcgaatatcagggcgcccaaaagcagtgcccataaaatcgcttgatctccgaatatacctgtaaagacggacaggatgacgccggctgaaacaaaacccgcggatccccactgtcggctagtcccataagcctttaattcgttatgctgtacaaggacgccgcaagcgctgtctaaagcaggcattaaagccgggtaaaacacatgcagcactaatgtgacaagaagcaggctttgaaaagaatcagccggaatataacataaaagtgcgagaagcgtcccgattctggcgccgtttaataaggctttgctgctgaattttcctgataaataagggaagaaaaataatgtggaaatccctcttgccgccaggcccagactcataatgaaactggcttcggatacggaaaccccttttatatgcaccatccatcccgtccaatagggcagaaaaacaccccatgtcataaaaaaactaaaaaaatgcagactcatccagcgatatgctttcattcccgttcctcctttaattggcatgttatcatgtaaggacataaagacaatatgagatatctcatatttttggggtggacgatggaaatttataaaggcgagaaaaagcggcatcagttagaaaaacactcaatcgcgcatttattctctttccccgctgaagagtttatggaagtgcgcgaatatgagcgggacgaatggattattcaagagggcaggaggccagacttcctgttttacgtgattgaaggaaaagcgaaaatatatgtaacccaccaaaacgggaaagtttctttaattaattttatcaacaaaaatgattacatcggagagatggaactattacatgaagtgtattacacaaaaggaattcaagcctcagcgaagactgtttgttttgttctgcctatttaccgctgccgcgtgcaattgctgcaggatgcgaaattcctgcgtgagctggctaagtttttaagtgctaaggcaacgcttatggcttcgaaatattcacaaagtctggcgttcccgcttgaaaaccggcttgctgattttattttgcagacggcttataaaggggtttataaagagaagcacgtaacggtctgtgattatttgggtgtatcttaccgtcatctcttgcatgtgctgacgcaattctgccaaaaagggtatttgcaaaaagaggggcggggctatcaaattaagcagtatgattcattgtatgaactggcagaagcgctgcagaataagtagcatgcccagaaaaaacagccacccgcaatttacggatggctgttttcattatacaagctgagcttgtttttttcgtgcctgtttcgcggcgtcgaccatattttttaatgccgcaacggtttcttcctgctgtcttgttttcagtccgcagtccgggtttacccagaagcggtcagtcggacacacctcaagcgcgtcatcaataatttgatagatttcttcagttgccggcacacgcgggctgtgaatgtcgtatacaccgagtccgaggcctttcacgtaaggatgttctttcaggtactctaaaaatcctccgtggcttctgctgtgttcgattgtaatgacatccgcgtcaagatcattgatcgtatctacgatatcttcaaagttgctgtaacacatatgcgtatgaatctgcgtctcattttgcacagaagacgtcgttaaccggaatgcttctgcggcccaagttaaatattcatcccaatcctgcgtttttaacggcagtccttcgcggagcgcgggttcatccacttggataatctgaataccggcatcttcaagcgcttttacttcttttctgagggcaagcccgatctggaaggcgatttcttttcttgaaatatccacacgcgggaatgaccagtttaagatggtgacaggtcccgtcagcatgcctttcatatgtttttccgtcagcgattgggcgtagaccgtatcttttaccgtcatcggttcgataaattcgacatctccgaaaatgacaggcggacgtacgcagcgtgaaccgtaagactggacccatgcatatttcgtaaaggcgaatccggccagcttttcaccgaagtattccaccatgtccgtccgctcaaattctccgtgaacgagcacgtctaagccgatttcttcctgaatgtcaacccagcgcttcgtttccgcattaataaaggcttggtactgttcatccgtccaatcttttttccgccatttttgccgtgcgctccgcacctcggcagattgagggaagcttccgattgtcgtcgtcggcagaaggggaagaccgagtgattcattctgcagcgccaatcgttcttcaaagcttgccggacgggagaaatctttttccgtcagctgattcagctcttctttttgagcggagttcgctcctgttgcgaatgcttttaaagccttaagtgccgattttgattcttcgatctgctcactgacggccgctttgccggacagaagcccttcttttaagacgccgagttccgccagtttttctttagcgtatgacaggccgttcagcaaatccttttcaagatgctcgtcagggtgtttcgccaccggcacgtgcagaaggctgcttgaaggctgaatccataactcctcaacatcagcgtggctgaggatatccaaagccgcatcaaggcgttcttctacatcgattttccaaatgttccggccgtcgaccacaccggctgccagcactttatctttcgggaagccgtgctttttcaattgctcaaggtttctgcctttatcatgcacgaaatcaagtccgattccctgtacgggataagaaacgagttcttcatatgcatcaactgaatcaaagtatgtctgcaggaggacattcagtcctgaaagctcttttgtaatagattcatagaggtcttttgcggcgcggacatcttcagaagaagctgtcacaagggcaggctcatcaatctgaacccatttgacgccttctgcttcaagctctttcagcagctgcacataaagaggaacaaggcgtttttgaatcgctttcgcttctgattcttcgtatcctttcgcaagcgtgacgaatgtatacggaccgacgatgacaggtttcgtttccgctccgaattcttctttgatccggcggtagtcgtcaagctgtttgtttctcgtcagacggaattcaatgctttcgtcatattcaggaacgatgtaatggtagttggtattgaaccatttcgtcatttcactggaaacggcgtcttttacaccgcgggcaatcgcaaagtatgtatcaacgggatccgtgatgctgcggaatctttccggaatccagttaaagctgacggcggtatcaagcacatgatcataatgagtgaaatcagagaccggcacgatatcgatatgttggtcaagctgtgttttgacagctgataagaataaaccgtcaagctctttaagaaacgtttctttatcagtgtttcctttccaataagcctcaagtgcttttttccattctctgttcaagccgattctcggaaaaccgaggttcgaagttttgattgttgtcattaagtctcctcctttaagtgagatgtaacaaaaaagcctctttctcatgagagaaagaggctttaacttcaaaatgcaagcctctcttatctctcagatcacgtctgatggaattagcaccgtgccttatgagacaatcgtctcggcgcaaaaatcacgcgccccatttcacaatggaattacggtcggttgctgttggggtcaaaaggccaatccctcgcccaactctcgataagagaaagtatttcaatttttttgaaaagttacatcatttgttggttatcttatcagcttattcagatcactgtcaatagaaaatctcacaatttaaaaattggtgatgtgacaaactgatcaatcattatacgagaaaaatatcagaaagacagcagctgtgcctgttcggctctttccatcagcacttcaggcgcgtctaaatacagaaatccgttcccggccaatgttttggcgatgtccaaaggaagggtccgccgcacgagctgggcgtagacttcagcctcagaaagcgtccgctgaaacgcgtcctgttcaagcccttttattaaggcaagcgcaccgctcacatgcggggcggccattgaagtgcccgtcagcttcccgtatttatggttgggaagggtggagagaatattttctcccggagccaccaggtcaatctctttattagcgtttgaaaattcagacgatttacgggcgattgagactgatccgactgcgatcacttcgttgtaagcggccggatacgacagttcctctgtacgctcgtctccgtcgccttcgtttcctgccgcgcaaacgaccagaacaccgctttttaccgcatttgtgaccgcttctttcagttcaggcacatcgcttggcccgccgagtgacatggaaataatgtccgccttttgttcaacggcgtagttgatgccgttaatgatccattcgtatttgccgctgccgtttttcccgccgagaactttaacgattaaaaggcttgcttccggcgcgacacccgaaattccgccgtttgaatcattggctgcaatcgttccggaaacgtgtgtcccgtgtccgttgtaatcggaaatcacgtcttctttgcctccgtcatcatcggtgaagtttttcccgccgacaatccggtctttcaaatcaggatgattgatgtcgcagcctgtgtcaaggaccgcgattttaatatccttgcctttaaacccttttgcccacaactctggcgccttaatcactttaatcccctcaggaagctcgttcacatccatgatctgttcatccgtgacataaggaatcaaatgcatttcaccattcataaaaaagccctccttttttatgcttgccagtggatacaagggtgttgctactattttatggcagagcatgccggccggaaagagtcatttgaagcattttcataaaaaaggcgtaatctatcggactaaaaaatttcaaataaatggatagtttgacagctttcattttcattcatgacccgctgacgctataattggaaatgggaaaggagaagagagatgaagataaatgaagcgttatacagctatttttcagaacaagtggatcaaattgcgaaagagtggatcgaaacgatggaagattcggatccgaattcgatttattctttgacaaatcccgtcatcacagaagaactgacggagcaggataaagaattttaccggcatattaataaaatgtatatcatgccggaaaaagaatttttagaagaattcgagcggtgggtgattgagcttgcgaaagaccagaagcatctggatactcccgtccagtatgtggtccgtgaattcatgagaaaccggagactatacatcagttattatgatgcgtttgccgataaacatgaatcttcgtttgccgagggagaaaggaagaaatgggagaatttaattgcacaagtatttgattttacgatttacacgtttgtcgatcatgctgagcataactcaaaaatgcagctgaatgcgcaaagagaaatgattttggagttaagctcgccggttatcacgctgagcaaacggacggcgctgctgccgcttgtcggcgatattgacacggagcgcgccaaattcattcttgaaaatacgctgagcacatgtgcaaaacggctgattgaacatctgttaattgacctgtcgggtgtagtggttgtcgatacgatggtggcgcatcagatttttaaattaattgaagcgctgaaattgatcggcgtcacgtccactttatccggaatcaggccggaaattgctcaaaccgccgtacagctcggcattaatttctcagagattacggtcaagtccaatctcgctcaggctctcaattatcatcaataacatacataacaaaacaggctgccgaatcactccggcggcctgtttttatacaaacaacaatgaaatgagccagcttgcgccgaataacagaagcacgagcaggaaaaagcaccagtcggcgcggcgcacagtaacagttctgtaaaacgtgcggtttcggctcccagtaaagcctttagattccatcgcgatggccgtgcgttccgcctttctgattgcgcctgccaatagcggaatggtgaagcgcctgaaggcggagagctttcctttcagcccggaatcagacgccgcacccctgattctgtgcgcctgccggatgatcaggatttcatctttcagaagagggagaaaccggaatcccgcgataacgccgtatgcaagcttgggcggcagcttacactgctgaatcagactgagcatgaacagaatcggatcggttgtaaaaagaaacatcatcgacaaagcggaaaaacataaaatacgaaacgcgatagaaatcccgagcgccgcgttatcactgttgacggcaatcggcccgagtttaaacagcagattgctcccggttgtcgggacgtttccgaatacggcggctgtccataaagaaccgaaggccagaatgacaaacggaatcgtgaacagcagccattttttcagcggcacacgccccgccgagaggacgcctcccgcaatgatgatataaaacaaagcaggggtgtacggattataaataaatgacagcataatgacgcataacaatacagccgccgcctttattgacgggttaacagcctccagccgcaagttcatttttccgcctcctgtcgtgtttcatccattcataccgcaggggcaaagctaaatgcgcccgctccgcgattccgatatgatcagaaaacaatgagtcgggcgttccgcggtacaccagcttcgtgccgcagagcacaaggatcgtgtcggcataatccgagacgagttccatatcgtgtgtcaccatcaaaacagccgttccttccttttgaatctcacggagcatttgcatacactcccgcgccgttttggcatcctgtccgaaagtcggttcatcaagcatcaaaacgttcacattgtgcataagcatcgtcgcgacgctgagcctgcgtttttgtccttggcttaaagaaaacggatgctgtgaggcatggcgtctcatgccgaatcgggttaacagctgaagagctttctcctttgcggctctgttgctttcaaaaccgaacatcagctcttgaatgacggaatctgtgacaaactggtgttcaggattctggaaaacatatccgatctgtcgccgcagctctttttcagaataggaatcaatcggtctgccgtctattttgatgtctccgcccagcggacggatgagcttggccgcggcagaaaggagcgtggattttcctgttccgttaggaccggcaatcgcggtgattgaacctttttttacggaaaagctcacatcctgaaaaatgacttctgctcctcttgagaatgacagttcgtgaacgctcagcgcgtcttctgccgaaagcgcggcgggccggggttcgggcagagatggtacaggttcgtgaaacagattttctttacacaatgtaaaaggaatgctgacgtgctcctgcaatgagatcacacgcggaatcggaatgccgagctgtatcagctcttcaatccttgtttcaaagataacatccgtctctccgtccatcaccttctgacccgtttcgtcaaggacaatcgtcctgtccatccacggcgcccagtgatcaagctgatgttcgataacgagaaggccgaagcctttttttgcttgaagatctttgatcagccgcactaattcacgtgccgaatatggatcaagctgtgccgtcggttcgtccaaaataatgagttccggttccatcgcaatgatacaggcaagcgccactttttgttttgaaccgcctgacagcgaagcgatcgttcgcgttttcagatgagtgatctctaatttttctaaaacgtcatcgatgattgcgtccatatcttcttttgtatattgcaaattttccaggccgaaggcgatttcatcttcaacggtcagcatgcaaaactgctggtccggatcttgaaacacgacgccgatagatctggcggcgggttctgtcaggtgtgaaagaggtgttccgtataaagaaacggttcccgattgaaccccatcgcatgcttccgggtacagaccgtttaaacagagagcgagcgagcttttgccgcatccgctcggcccgagcaataaagcccgctctcctttgcggagctgaaaggacacgttttgaaaaatcggcttttcatcctgatcataagaaaaggtaagacggccggcggatagaaggggttcagatgcctgcatcttggttcacctgtttctttttcttcttgaattgttttccgagcgccatgccgttcagcactcctgtgtaagccagcgcatcactgattgctttgccgagaaggccggcaagaagcgcacctgagaccagacggatgagaagcatgacggctaataaacccggattcaaaacagagtatccggaaacgaacaagtcataaatgaagcttgtcacagaagaccccataccggataaaagaagcacgggcagggtatacacccgccagcgtgtcgctaaaaagattgcttccgcaccgattccctgtgcgatcccgatcagaatcaccatcggtcctgacggatttccgagtaagcactccacaaacgcggcgatgatttcagaaacgagagccgctcccggtttttgaataatgtacgcggcaatcaccgagacgataaaccagataccgtaaatcggttcgtagctcatccggccgaaaaatcctgccgctatattgcttgcatgagttgatactaaataaatgacagcaaatacaacactgatgacggacatgacgacaatttctctcattttccaatttttcattgtgatctcctgctttcttatcgatagtcgtaagtatgaaagagttgattttacgaaagacgattgatcgtaagtttcatattgcggtgtcctcccccgttttttaatgaaaaataaaaaactgcatatccgagggaatatgcagcagcagaacgaaaacgcatggggaaaaaccctgcgctccggtcaatctgcacttccccacgctggtattatccagatcgggttataagggatcaaaacacgcctgccgcatgttttatctcagccgataacagcacccctagtgcgtttcctatacagttttttataatgacatcatcatagttgatcatgtctgatttgtaaacagcctttctccgaacagagtttggaatcggaccggaagatcattcataaagataagaagagcccttttgatcaaaaggaaacggaggacatctatgtttgttcatacagtgcagtctggagactcgttattttccatcagcagaaagtacggataccctgttgacagcatcagaagcgtcaacgggcttgaggaaacgaatatcgttccggggcaggcgcttttaatccctcttaatgaatatacggttcagccgaatgatacgtatgccgttatcgcaggtaaggcttatgtgccgcagatgcagctgatgcaggcaaacccggatattccgccgaaccggctgcggacgggtatgaaagtgaagatccctgatatctctaactatcttgcgggaaccctgcaattttatgtcattcggacgcctgaagcggatagagagctgattaatgattttgcgccgtattcttcggcgatttctttgtttgaatatcatttcggcccgaatggagatatcatgaacgatttaaacgacagaaccgcaatagaaaccacatggcagaacagagtgcgcccgcttgccgtcattacgaatctgacagaagggggattcagtccggaattagcccatcaagtgctgcagaatccggcggcaagaacgaatctcgtcaacaatatcgtctccttaacggtaagaaagggatacggcggtgtaaatatcgattttgaacgggtcagagaagctgacagggatctcttcacaggatttctccggcagttaaaaacccggctttcagagcatcagctcgcgttaacgatatcggttccggcgaaaacaagtgatgcagtgccgtggctgaggggatatgattacggcggaatcggagccgtcgtcgattatatgttcattatggcgtacgactggcaccacgccggcagtgagccgggacccgtggcgcctttaacagaggtcaggcaaacgatcaattttgccatcagcagggtgccgagaagaaaagtgattctcggtgttccgctgtacgggtatgattgggtgattccgtaccgtcccggaacgatcggatctgccatctccaatcagcgcgccatggaaacggcgatgaagcatcaatcaatgatccgttattcccagcaggagcgttccccttacttccggtatactgatgaaaatggaagaacgcatgaagtgtggtttgaggatgtgcggagcatgagtgaaaaaatggttctcgttcgggagttcggactgcaggcgatcggcgcgtggcaattaacgctcggtttcaaaccgggcccgtggctgcttaggaacttttttacgatccgaaaaatatagctgcatgtcccgttccgcaagtgattttttctttcctatgataacggagcttcttttggacaatctaaaattgagaaggaggtctgtcatatgaagaaaagggaagagcagtatatcaacgaggctgagtatgtaccgcatccgacaaaagaaggggaatacgcgctcatgctgcatgaatcctatcatttcctttcagaagacgatgaaagcgatttgccggaataagggctttatgcctttattccgtttattttataggcatgtgctgaaatcacaaatttaaggttgacacattccttttttttctgtaatctcagtgtgtcaattcaaataagaacttcgttaggtgaggctcctgtatggagatacgctgctgcccaaaaatgtccaaagacgccaatgggtcaacaggaatcatcgacataaggtgattcttaacgcagctggatggctgtcctatgccatacagtgctaaagctctacgattggaggccccgcacgtttatttgccgtgcttgttttcgccttcatatcggaaggttttttttatgcctcaaaacgtacacgactgagcatgataaggaggtgcggagtatggattctccccattcgagtatgtcagaagaagtacccatatacagccagataaccagtgacgacatgatgaggagacaaaccgccgcacttcccttgacggacggcgcgtctccgtaaaggaggtacgagtcccgatggtccaaaacatgacctatgacgaactcatattacgcattatcattttattgcgggacggaaaaataaaagaattccgaaacatgatagatgagcttcagccctatgacatggcatttttatttaaagaaatgccggaaaagcaccgggcccgctatctgtcatatatgacggttgatgacatcaccgacatgatcggagagctggagcgggaatttcagcttgccgttttgcataaggtcggtaaaacgaaagccactctcgcaatgaataaaatggataacgacgatctcgccgcattgcttgaagagatggatgaagaactgaaagaacagcttttatccagtatggaggctgaggaatcaaaggccgtacagcttttgatgaactatccgcaagaatcggcgggccggatgatgacgaaccgcttcgtctggattccgcagcattatacagtaaaagatgcggtcgtgaagctgaaaagctttgcagaaatcgcagaatcaataaattatttgtacgtgattaatgacagcaagcagcttgtcggagtgctctcttacagagatttaattctcggcgagcctgacgataaagtgcaggatctcatgtttacgcgtgtcatctcggccggggtgctccaagaccaggaagaagtcgcccggctgatccagcggtatgactttttagccattcccatcgtggaagaaaataatgtgcttgtcggtattgtcactgtcgatgatattattgacgtcgtgattaaagaagccgatgaagattacgaaaaattcgcagcctccggtaaggcgattacatttgatacgaaagcatacgtggcggcgtaccgccgtttgccgtggctcattctgcttttgtttatcggattgatttccggaagcattctgaattattttgaagatacattgcaaaaagtagtcgccctcgcgtttttcatgccgatgatcgcgggaacgacgggtaatacaggcacacagtcacttgccgtcgtcatcagaggactggctaaagaagaaatgaataaaaaaaccatctttaaactgattttccgtgaattaagaaccggtatctacatcggcatcgtctgtgcgatcgcgattacgatcgtcgcaaccgtctggcagaaagacttaacgctcggttttgtcgtcggttcatcgctgcttgcaacgttgattatcggtacgatggccggaacgatcgtccctattattcttcataaactgaacattgacccggcgattgcgtcaggaccgctgattacgacgctgaacgatattttgtccttattaatttatttcggcattgcaactgcatttcttcatgctttataaaaaaagtccgtctcacaggaggcggacttttttgatcagcggtttttatacttaaaatgagcattaagctgtccttccagcatttttttgcggagctgcgggtcgtttttgagagcctgttcttttttccgcatgtcttttaaaatctcagccgtctgcacgccgtcttcccgcttgttggcaatatccatcagccgctcaacgtccgcgaaggaatactttctcgttccccgtgatgatcgctgcgggtagattaatttccgttcttcatagtatctgatctgtctgactgacaatccggttaattcgcttacaatgccgatcgagattacttttttatctttgtaagattgttcgtctgtcgtcatttttccacccctggatgtcttttactcatattatataagaaaaaaagagaaaaaacctgacgcttgtcaggttttctgacgcggaatagaaaattttagaaaaaaagcggcagaaaaattgacaaggttaatgcatggttctgtgcccccgttttatgcttattgtacagatacaatgaggaggaaggataggaatggagaaagaaaaagcggtttcgctggcaaaagaaatcattgaattagatatgaaacgcgatgaaatgctggaggcgttcatgcagcttgccggggaacacgcttttccgctgctcagagccgtccagaacggtctttaccgaaaaacatcataatctacagaagttttacaatggctttatacatctttgatataaaagcgttattctgatcatagaataacggaaaacaaaggaggccgtcatgagtcgtttgcttcaaaatgcattggataaagagagaaaccattattccaaaaagcttctgcagatcggagtctatacgaaagaaatacttaattccatgacaattacggagctgagaaaggaatacgcgtatttttttcggaacattccctataaagaacggaacccttatacaaattaaatgatgtataagggtatttttttatataaaaaagaaggaattctgaaaaacggcacgaatagaatataaaacaaagaacgactcttatgaattgtaagggtttacattatttttttataaaaatcttaaatacggggtagatatgatgagattatcatttaacgaagaagaagtgatgcgttcgatgaatttgtacaaagtttttgcaagggctttcaagagtgtgtctgaacacagcatccgcgatagtaaagaacacggttttaatccgactgaatttgccgttttggagctgctctatacgagaggaccgcaaaagcttcagcaaatcgggtcgcgtcttttgcttgtcagcgggaatgtcacctatgtcatcgacaagcttgaaagaaacgggtttttggtcagagaacaagacccgaaggacaaacggtctgtttacgcccatttaactgataaaggaaacgagtatttggataaaatttatccgattcattcattgagaattgcgagagcgttttcaggacttatgcctgaggaacaggaacagctgatagccttactgaaaaaagcaggaattcacagccagcatttgcttttccgttaaaagaaagcggatacagacactcttcttcatgaagagtgtttttttctgtttcggacagtagagcctgaagcggtttttgcataagctgatacagggctgcatcattatttaccaatcataatgtgtcatgcctcatgccaaaatatgagggtgctttgaatataaagaaggtgaacatgtgagaagctgtctgctgtctatatggtacttacttgatccgctttatttcttctttacccggctgacgctgattgataaacggcaatcgaatgtattccgcgtccgtttgactagatataaaggaaaagatgtcatcctgagcgacggaaccaggattaaaaaaaacgacgtgttagttaagattcatcttcataatgtcaaactcctgaaagagctgcagcctattgaaagcgcggtcagaagggggattatgctatatcagaaggtatatcaatccatgcctcatttagcggattatattaaccagcataaacggaaagacgagattaagggagtcgtcggcattacaatgcttcataaaggagcggcgagactcggttttgatgtgataaaaccgtccagcggctgctacaggctgtttaagaaagcggcccatcttccgattttatactttactgcaaaacagctcaccctcaaaaacattccttactcctgctatttatttatttccaaagaaaaattgatgtgcacgtatcagactgaaaagagctgaccaaaagcgtcagctctttctcttgatttgctcaagcacgattgaaagcgggccgtcctgcggattccggtaaaaatcataaaacggatctccctctgtcctgacgcggttcactactgtatcgatcgtataatcatcaggtgttaaagaggagttgacttcgctccaataaaggggagccgcaaccgttcccaattcgttgccccgggtcgaatagggggcgataatggttttcccttcggcatgctgcaaataatctaggtagagcctgccgtttcggtttttgataaaccgctctgtcgtaaaaagatccgggcgcgtcctgacgcaataatcggcgatgagcattgtgaacgcacgggtttcttcataggtgaatgcttccggtgaaagcgggatgtaaagctgaatgcctttatttccggagagcttcgggaatgacgtcatgctgaatgagtcaaacagctgtttcagcacatgcgcagcctccactgccataggaaaatcattccttgacggaggatcaagatcaatgacgatttctgcgggcctttcagaatgcactgtctgaaacggaacgtgaaattcaagcgccagctgattagccagccatagaagtgacggtacgctgctgcatacgatgtgctcgtggctcccgtcaaacacgcttgtgacaaagtccggcgtgtagtccggtttgtttttttgaaagaaagattcgccaggcgcgccgtgcggataacggatcaccgtgacggcccgatctttaagaaagggcatcagaaaatcgctcattttcaccatataactaaggaaatctgctttcgttttttcacgttttttaaaaacgatcttatccaggcttgtgaactgcagcttcggcggcagcgttttagagcggaggataagctgctgatacgtgcattccgtccaatccatttcaaactgaaaggacacaaaagatacttcacgcagcgtgtcctgcaatatggttaaatactgcacggtcatgcagatagaaggctcaagtgtatactcgccgcttttttgtttttttccgtgggtctccataatggttctgacggcgtttttttcttccgcctgcatgccgtgggaaacggaagcgatcgggacgacgatgccgtctttcaaaacagaggccgtcacatacccgttcttcggattgaatccggttaatagcacgtgagccgttttcatatgtttatacttctgccagtcgggagagcgtttattttccgcccatccgctggaagtccttttggctacgataccttctccgtcatggcggacgaccttgtcccaaagcgcgtcaaagtcagtgtgctccggaatgtattgaatcgcttcttccgctaagtgatgagggcaggcgggaagatttgcttctttaagcagattggaaagggcgcgcttccgtttcacatacggtaatgagacggtgcccgcgccttccagaacgaggagatcaaatgccagaaagcggcacggccgtctatcagcggtgcttttaattgcttcggttcgttttaaacgtccgcggatttgaagatgctcaaagtccgctctgtacggattgattaaatagacaagctctccgtcaagcgtaatggggaacctgtctttcatgtgctgaaaacaccgggccgcaaaagccgtgatttccggaaattgattcgtcagcgtctgtccgtttctgctggttaatgtaacaccgttttcgtctatgcggagaagacagcggaatccgtcatattttacctcatagcgccactcactgccttcaggcggtacagaggtcaaaatcggctgcatcgtcagcaccatgattaagacgttccggctttttgtctggtcgtcttctgctttttgcctccgccgccagctgacgctgtgtcttttgtccgtgccggtgcagcctgttcgcgattcggccgcttcgtccggtcaatgcttgcctgaagcgcgctgacaagatcaatgacatcttctcgcgggccggcaggagcaggtgtcacgcccgcttcttcatgttcgagcttatcgttaattttggcgagaagggctttccggtatgtgtcttcgtattgttccgggtcaaactcggttgtcagctcattaattaatgtgatcgccgtctgcagctctttttcattaacggctgtctgctcaggaacgcccggcacatgtccggcatttctgacctcatccggataatgaatggattccatcacgatgcagttgtcatacacgcgaagaatcgcaagctgctgtttagagcggatcgtaatggaggcaatcccgattttacccgtcgtcctcagcgcttcccgcagaagtgtataggcttttgtgccgttgtctcccggcccgacataatatgaccggttaaaataaatcggatcgatttcctgcagctggacaaagtcaacaatctcaaccgctttttcttcatgttcctgttttacgtctttcaagtcttcgtctgtcataatgacgtatttcccttttacatactcatagcctttcacgatttcatcaggctccagactcttttcacatccggtgcagattttttcgtatttaatcggcgcatggtcttctttatgaagactgcggaattttatatctttatcttcagtggccgcaaagagcttgaccgggatattgacgaggccgaaactgatcgaacccttccacatcgtgtgcatgaataaaaactcctttttgtctttattgtggataaacgggtccgttccatgtgtagcaacttatgggtgatgcggcgttcatggagcggctattctatttcctcatgcggtaatagccggctgaaaaggaaatcgcatgtgaatcggtaagttctttaaatcgctgaagtccccgaaaatcatcaatggttgatcaaaaaaattatacagaatcattccccgggaaatgcccacgcatttccatgtagtgaccgagagaatttcccgctcccataaaaacagattcggcgatggcaaagatcccggcaaaacgcactgcccatatgaactgaattccggtcagcgccgcttaccgcaaatggtaactttccggagatcttaagtgatgtaaccgccgccagacgagcattcaggagacaggcgggacgttgtattgcgcatgtcattccctcccgctataccgatctgaaacgactatatttataacgggcatgtctaaaagatatttcagcctcaaggttttgtgttaaaatcattcttaagtttcagaatatagacgtaagccgggagtgatagatcatcgaagatttcatcatatcaataattgaagcgtttaaaagcttatcttacgccggaatttttttggcgctcagtatagaattcatcccggcggaaattgttcttccgcttgcgggctattgggtctcaaaaggggatatgacgcttgccggagccgtgtttgccggttcgctcggcggtgtttcaggtccgcttgtcttatatgggatcggcaggctgggcggtcggccgtttttgctgaaatatggaaagtacatatggataaaacccgaatttctgcagaaatcagatgatttctttcagaagcacggaggtttggtagcgttcagcggccgttttataccgggggtcaggacgctgatttctttgccgtgcggcattgcgaagatgaatatctgggtgttctctctctatacatatgcagcgatgctgccgattacatttgcttacgtatacctcggtatgaaactcggggaaaattggaaaagcgtcggttccattctcgatcaatatatgctgccgctcggtatattcattgtgttgcttctcgttctttggatgtttttgaagagaagaaaacagcgggtcaaaacagaaaaaatttctcaatttgttaaaaaagttaagcgttgacaaatgatgaaacaggctttatcatgagcgtataaacaaatatttcttgaaatcccaaaggggagtagcgtccggatattccggaaacaaagtcgtcaattcatggatcatatccatcgactttgttggcatgccaatcattcatgtctagcaagacctttgccttatatcggcaaaggtcttttttgcgtaaaaaaaccgccggtataagctcggatgatagaaaaaagaaacggagggaatggattggactttgcattattattggagtatggatgggttcttctcgttttaatcgggctggaagggattttggcggcggataacgcgctggtgatggctgtgatggtgaagcatcttcctgaaaaacaaaggaagaaggctttattttacggattggcgggcgcatttattttgcgtttcgggtcgctgttcgccatttcatttctggtgaatgtttggcaggtccaggccgtcggcgctttatacctgttttacattgcggtcagccatttgctgaagcggtatgtattcaaagataacgccgggcagaaaacgcagaaagaaagcgggttttggcagactgtcttgaaagtggagctcgcggacatcgcttttgccgttgactccattttagcggcggtcgcacttgccgtaacgcttccgggaacacggcttcctgccatcggcggcttggacggcggtcagtttctcgttattttagccggcggcgtaatcggtttaatcattatgcgttttgcggcatcaatgttcgtatccttactgaaaaccaggccgggccttgaaacggcggcatttgtgattgtcggatgggtaggcgtgaagctcgctctttatacgttggcccatgaggaactcggtataattccggcagatgtcatccattcggcggcctggaaaatcattttctgggcggttctggctgccattgcggtttgcggatggtttatgtcaggagcaaaacaaacagagtccggcgcggcatcggaaaaaagagaacacgcgtaaaatgatcaaaaagggagtctggctttttagaaagcaggttcccttttttgtttgaagcgcttacatttaagacatatgataacaattttataacagcattgttacaaaaaacacagagaaaacccccttaattctgcatgggggcacgaaatcatgtatagtacgtcttattggcttgtcataattgagacaaatgaaatcgatttctctttttcttcctttgcgaatccctactaaattagctatgattatgagtagttatagggaggaactgaggtgaaaccagtgcttagccttttgtttaaattgggaaaaaagaagcaaacgcttgaaacatctgttgaaaaaatacaaaaaggcgacaaagatctgcagaacgatttaatacagcaatataagccttttatcgcgaagacggtttcatccgtttgtaaacgatatatagatgaaaaagacgacgaattcagcatcgggctgatcgcgtttaacgaagctattgaaaagtattcggctgaaaaaggtaattcgctgcttgcatttgcagagctgattataaaaagaaaagtgatagactatatcagaaaagaagcaagaaccgctcagcatatcaatatggatgtgcaggagggcgacgaccaggaatcttcgcagagccttatcgaagcggagctttccattgatgaataccgcaaacagatagaacaggaacagcgccgggaagaaattcttttttttcagaagcagctgaaagaatacggcctgtcttttaaagagctgctggaacaatcgccgaagcatactgatgcgaggcagaatgcgattaaggtagcctacacgcttgttgaaaatgaagagctggcgtccattttgcaccagaaaaaacagcttcctgtcaaacagctggagcagcttgtgtcggtcagcagaaaaacgattgaacggaaccgaaaatatatcatcgccatgagtattattattaccggtgattatatttatttaaaagattatcttaaaggggtgttgcactcatgagaagagggatcatagtagagaaaaataaaaaattcgtcacgttgctaacccctgacggacaatttttaaaaacaaaaaatgatcaccgcacttgtgaaatcggagaggaaattacgttcgaaggcgaaacgcgtatgggaagaagggccagcttttttgattttctgaaactgcgcccttttaaattgggagtgtttacgatgactgctattattttgtttattttaattttgctcccggttttttctgataacaaagcttacgcgtatatgacgcttgacattaatcccagcattgaaatggctttaaacagcaaatatgaagtcattgaactgacaccgctgaaccatgacgccaaacaggtcatcagtgacatcggagattggaaaagcagcgattttaaggaagtcatcaataatattattaccgattgcagcaagcatggatatgtaaaggaatcaaaagagattttaatttccacggtttatgaaaatacagatgacaatacatataaaaaaggcgttaaaaaacagctggctgacatgactgaaaaatataagggcacctaccaggtccaatctcttgaatctgatatggaaacaagagaaaaagcaaaacaggaagggatgtcaacaggcagctacataagaagaaacgaaaagaaaacagaagaaaaacagtctgaaaagcaaaccgacggcaatgaaacagatcaaaaagataccgaaacagacgctgatcaaagcaaacagccggacacagaaaagccggcggctgatgaaaagacagctcctgatgaagaaaaggcagcagagaagccggaaaacaatgaaacaacgcccggcacggaagaagcgaagccggacagtcaggacggcagtcagcaaaccgacaaaaatgcagcttccggatcagaagaaaacacacagaaggaacaagatggggaaacagagcagcccccaacacaaaatcctcaggaaaacggaaatgacaaagagcctaagcaaaagtattacaatcattactggaatcagcggaatcatgatcgcaatgaacattgggactcctatcggcatcatgaagattcgtcagaccgcaggaatccgaacggctaccggcacggaaaggagaatgccgataaatatcaaaattcgccgagaagtcccggcgaataagctgcattattgatttttcccgtttaattgtgattgagcctgctgtacaagacgttttgtcatttccccgcctacagagccgtttgcgcgtgctgctgtatcagagctaaggttcacgccgaattcttgagccacttcgtatttaaattggtcaagtgcctgctcagcccctggaactaagagtttatttctgctcgccatctttttcatctccttttctctggcaagatgtgtttacgcattttagtttcaaacggaacggtattgattatgctggcaattgttgtacagcaaaaaaccccggcgcagacaccggggcgaagaagcgttatgaattataataaatggctggtcattttgtaggctgaggcttgaatatggaaagtcaaaacggagagcaccgtgacggcgatgatggatctgatatcgttccattgtccgcttccgagttctttaaagcagcctttgagcttgtccgtctgctcttcgacgagctcctgcaggctcgtttccttcatcggcgggtttgctttatgatgaagataatcaatcacttgggcgcagctttcatagtagctgatcgggctgatgacgtcgtctgatctgtctgtgatcgtgttaaaagcgatttttaatatgccgcgtatatgttcgaagtcataaattgattttaaatcacgtacaatgagaaggatgacagcttgttcaattgtatattttttgccgagtaaggggtggccgattaaatctttaatatcgcgcttcacccagttttggacggcggttgattttaaagacgtcagctcgcacagatttcccagctcgacaatctcgttagttgaaagcccgtattcctttttctctttttttcgttcgaatctcgtcagaaattcagggatatgcagacggctttccgcttcatccaatgtcatttccgctgattgcaataagatttggagaggagttgcgtctccttggccttttaacgcgtaaagaagccggaccatatcagttcgggtcagtttaaacgtgttcatggttcacctctgattgattacgtgttcactttctgatatcactgagaattacatttacatcatacgtcgaaattgttgcattttcaaacagatcatttataatttaattaaataagttcttttgatcttaaaaaagacggaggtaattatggcgaaaagaatatttctgtttattttaacgaaccttttggtcattacgacaatcggaattgtgcttacgattattacaagcgttaccggtgtcggctcgtatatacaaaatggccgcattgatctgatggcattgctcgtgttcagtcttgtcgtcggttttgtcggttcttttatttctctcggaatgtccagatggatggccaaaacgatgatgggcgtccgggtgttaaatccgaagaaacagtcactcagctatgaagaacagcaattggttgaccgtgtgcacagattgtcccgtgccgcagggatgacgaaaatgcctgaagtcggcatttatcagtccccggaggtcaatgcttttgcgaccggaccttctaagcgccgttcgcttgtcgcggtttcttcaggtttattgcagcagatggatgatgctgcggtggaaggggttcttgcccatgaagtcgcacacatcacaaacggtgatatggtcacgatgacgctgctgcagggaatcgtcaatacgttcgtcgtattcctttcccgaatcgcggcatgggttgcaagccgctttgtcaaagaagacctcgcaccggtcgtgcattttatcgcgatgatcgtgtttcagattatcttttccattctcggcagtcttgtcgtcttcgcctactcgcgccacagagagtttcacgctgaccgcggcggtgcagaccttgccggcaaggataaaatgattcacgccctgcgtacgctgaagtcttatacaggacatgtgaatgaagaagaccagacggcggtgcagacgttaaaaattaacggcaaaaagcattcgtcactgttctccacacaccctgatctcgatgagcgcatccgcaggctggaagcaaaataataaacaaaacctctgacaatcgtttcagaggttttttgtttaaagatcggcaaattacataaggtaatgaaaaatctttcaaaaaaggcctttaaaaattctcccaatatcattagaataattacgtactacatttgagaggcagaaggaactatcttatgaaattaaaactgaagaaattcatacagatcttgtcgcctgcacagctgattgcattatactattttcttgctgtgacggtggcatttattttgctaagtctgccggccgcccacaaacaaggggccagctggtcgtttatagacgcgctgtttacggctgtcagctcagtcagtgtcaccggtttaacggtcgtcaacacggctgatacattcagcacggccgggattgtcattttggctttcgtgcttcaattcggcggaatcggcattatgacgctcggaacattcgtctggctcattatgggcaaacggatcggtctgcgggaacggaagctcattatggtggatcagaatcaatcgcagttttccggtatcgtcaacctgatgaagcaagtgctgtttttgattttattaatcgagtttttaggcggcatcatcttaggaacatattttttaacatactatgattcgtttgaacaggcgtacttgcacggattctttgcgagcgtcagcgccacgacaaacggcggctttgatattacgggaaattcactcgtcccgttcagacatgactatttcgtgcagtttattacgatgcttctgattattttcggtgcgatcggttttccggtgctcgtagaagtaaaagactttttgttttcaaaacagcgcagatactcattcacgctgtttacgaaaattacgaccgttacgttcggaatgctcgttttgttcggagccgtgggcatttacgcgcttgaagcaagccatgttatgaaggggaaaagctggcatgatgttttatttttatgtctctttcaatcaactgctacgcgaagcggcgggcttgcgacaattgatatcagccagctgtcggcgccgacattatttttcatctgcgccctcatgtttatcggcgcatcaccgagctcggtcggcggcggaatccgtacgacgacgtttgcgcttaaccttcttgctctgtttcattttgccagagggaataaagcggtcaaggtctttaaacgcgagcttcatcaggctgatgtcatgaagtcgctggtcgttacgatgatggcgattctgctcgtgttcgggtcgacgctgattctttccgtgacggagacaaatcagacgctcctcggactgctttttgaagtgtgttccgctttcggaacgaccggcctgtcgctcgggattactccgcatttaagcgatatcggaaaatgtgtgatcatgattgtgatgtttatcggccggatcggcattttgactttcctttatttgatcggccgaaaagaaatcgaagcaaattatcattatccgaaggaaaggatgattatcggctgacaccgcttttcagaaagcggtgtttttttattgccgtaaaatggatgagtggaaacagtttctttggagattctacttgtaaagaggtgacgtcattgtttgccgtattttggaagtcggtagttatgatcgcggtcggtacctttttattgcggattgccggacggaaatccatcagccagctgtcggtgacccagacagtcatcatgatttcgatcggctcgattattattcagccgtttattgaacataatttatgggaaaccattttcgcggcggcgatttttattgcggtactgattctgatggaatatttagaaatcaaatcaagcttttttgagtttctattttcaggaaaaaccgtcgccgttgtcagaaacggaaaaatcatcccggaaaacttaaaaaaaatgcgttttaccgaagaccagctgtcaatgaggatcaggcaggaaggcctcggagacattcaagattttaaatatgtgctgcttgagccgaacggacagatcggctatgaactcattgatgaggccaaaaacgtgacagtgcgcgacttaaaaaaaatgcttaatgaattcaaaacagatttgctgacagaaggaggaaatcaaatgaaacgcaaagcagcaaagaatgaagctttgaccaacaacaatacaccgactgagagcatggacaaagatgcatacaaaacacaatatgacggtgatcccggactgagaggcgcaaaccgcaaatcaaaacacggcaaacaaggaggcgagtaatatgacgaaaaaaaaccgccacagcaaagacatgcaaaaccataaaaagccgatggaccctaaattgcttgaagaagagttttcaagcgagctcggtgattataacgccggaaaatggattgaaacgcttgaacagacgaagccgaagaaaaaagaagacggcaaaaaataaaaaatacctcttaagcggcaacgcttaagaggtattttgcattatttcgaataagcaccgtttcttgttcctttcaccgcttgaagcaagccggttatccgcagctcaataaacggctgtgcggccgttttcaccgcattgctggagagaatggacgtaagagcggccgttaacattaagagcatgactaaattctgataatcagacaagtgatcttcaagcccgatctgccgcagcgtttttataatgaatccatgcagcagatacacgtaaaacgttctcgtaccccatttcgtaaagaaataacgcttttgcggaacgagcgccaaaaagctgaaagtggcggcaaaggccaaaacataccagccgatgcgcgacagaccgctcaacagcgacactgtgccgaatgtagaataaggctccgatccgaacagccacgagtaatcaaaatcaatgcaccagcataagaggaaaacaatccccagtacgcccgcggcaatctgcctgcctcttttagcccgaagcaaatcaaagtgccgtttctttaaataaaacccgacgagaaacatcggaagaaagacaaacgtccgtgaaagactcagcgtgctgctgatgaaatcgagatacccgatcatgacggcaagcccgcagctcgccccaagcgcccacattttcggcagcttcgtaaagggataaagcagcagattccaaaagaataagctgactaaaaaccagagagaccactgcggatcaatcggattgacgcttgccatgctttcatcctgaatcaaatagtaaaaaaccgagtaaatgccctgaaaaatcaggtacggaataatcagcttcacagccagcttcttcacataacctttccgcttaaagttttttgcgaaatagccggaaaccaggataaaggccggcatatgaaaagtataaatgaatttgtagagatggagcataaactcatttccgttaataaatgaccggaggatatggccgaacaccaccagaaaaatcaagataaacttggcgttgtcaaagtaactgtctcgcgattttgtcatagcatcaccttctcttcaaaaatcatccactgcatgattatttcctgttggtgttcattttaaaataaaaaacaaaaaattgaaggaggacaaaagggattgttaggatgatgtaacggggaggtaaggatcgtagaaaaagactttaacttgtcatatcattgaaattttctgaaatgtatagggcgaatgaaggaagatgaggtattttgtagaaatattgaaggataggtttttgaagaaggagtgtactgaatggctgaaactctggatttgcaaacaaacgagtcgctgaaagagcagctgaagcggatgaaagaggaaaatgaccgcctgaagagtgatttgaaccggtatcatgtgattatgaataacacgcttgatgccatttttatatgccgtaaggaaatgaaaatcgtccaggcgaacgaggctgcggcccggatgatgcagattgaggcagagagccttattaaccgctccgtcctggactttttatattccgtgcctcaggaagaactgaataaggccgtgaaaaagtttttaaaaaaaggccatctgtggaaagaggtgccgattaagcttgacagcggcgcgacgaaatacattgaattcctcgccagagacggaattggggaggattatttttttgtggtgatgagggacatctcctctaaaaaaatattagagcgcgaattctccatgaacgagcagctgtttaaagatttgtttgacagggctgtcgacggcatcgtgctgtttgataaggacggcgggtttattgatgcgaacctctctttttgcaaaagctttgagatcggccagaatgaattgtcccatctgtcgctccgccattttaccgacggcgaaaacaaaaagcatctgaaagaaatctgggaaaccctccgcagaaaaggaaatgccaaaggagaactgcccgtcaagcttcggtccggcgaagagaagctgtttgaatttacgattacgtccaacttaatcagcgggttctacatgtccattatgagagatataacagagaaacggttgatggaattgaaactctttaaaagcgaagagcgattccgcgaaatttttgaaaacgcgatggacgcgattgtcatttggtctgatgacggaaagattgccaaagcaaacgaatcggcgtgccgcattttcgaactgccgatggataagctgctggagacgaatttatgtacgtttatcgttgatccgcagaaaaaatacaagcagattaagaagaaatatgaaaaatacggggaaatccgtgaagaaatgctgtttcagatggcgaacggccaatacaaagagcttgagtttacatcaaaacgaaccatacttgaaggtcagcatttaaccattttaagaaatgtcagcgatcgtaagcggatggaaaaagaattgcgggaaagcgagctgaaattcagaaaagtattcaacggctcaatggacggcaaggtcttatttgacaaccaattccgcattattgacgcgaatcctctcgcaagccgtatactcggcatgccggatgaggagctgagagcgtacaccgttccggatattctttctttatttgatattgaaaacgcgggtgttcccgccagaaagattgatttagaaggaatggataatgaaatccccttcctgttaagcagcagtgacagccgcaaactggaattctccttcaaaagaaatatcattcaaaatatgaatctggccatctttaaagatgtcacagaggccaaagaacttgaagagaggctgcggaaatccgacactcttcatgttgtaggggagctggcggcgggcatcgcccacgaaatcagaaacccgatgacagcgctgaaagggttcattcagcttcttcaaggaagcattgaaggcgaatattccctgtactttaacgtcattacctcagaattaaaacgcatcgagtctatcatcactgaatttttaattttagcgaaacctcaggcgatattatatgaagaaaaagacgtgacgcagattctgaaagacacggctgatcttttgaatgcccaggccaatcttgtcaatgtgcagattcatctgaacctgaccggaaacatcccgccgatttactgtgaaccgaatcaattaaaacaggtgtttatcaatattttaaaaaacgccattgaagtcatgccgggcggcggcaatatctacgtgaccatccagccttctgatcaagaccacattttgatttcttttcaagatgaaggaacaggcatttccgaagacaaattaaaacgtctgggcgagccattttacacgacaaaagacaggggaacgggcctcggtctgatggtcagctataaaatcatcgaagaacatcagggacgcattcatgtggaaagtgaagaagggaagggcacggtttttcatttgacgcttccgatccggcagaataccgaagaaagaaggagcggggaatgatctgttttacaagtgtaaaagcgccgtttggaaccgttatcgtaacagaggaagagggctttattaccggcctgtttctcaccggggaagattttgaggaatggcggaaagacgcgcccggcgtaaagccgtgcgaaaccgctttgctgtcggaggcgaaacagcagctggcatcctatttttcaggagaaagaaagcaattctctctgcctttgagacaaaaaggcacaccctttcaggaaagggtatggaacgcgctgacgatgattccttacggggaatcccgaagctacggcgatatggccgaagcgatcggaaaaccgaaagcggtgcgcgccatcggacaagccaataaacgaaaccggctgccgatttttgtcccgtgccatcgggtaatcggcaaaaacagcgccttaacgggatacgcgggcacgaagacggatgtaaaagcggtgctgctgaacatcgaacaaatatcctataaagaaaaataaaacatatggcacgttccgtttttttgcgtccgacatatcattttattaagtgaaaaaagttggtctggtgaaaaaggaggacgaagcctgatgaaaatgagccgtccgcaaaagatagccggttatgcagagctgttttttaaaatgcatctcattacagccgcccaaaaagatgaagtgattacattgtgcagacaaaaaaaccgctgacattgcccgaggcaacatcatcagcggtttttcagctcagctgacagtctgcgaataattgttcaatttcttccgtgtaagaaccggtcacaattcctttctcggtgataatgcctgaaatcaggctgcccggtgtgatgtcaaaggccggattgaagaccggcacatcttcgggagcggtgcgtatgcctgagatctgtctgacttcatccggatctctttcttcaatcggaatctgatcgccgttttcaatctgcaagtcaaaggtcgaaagcggtgcggccacaaaaaacggaatctgaaaggcgtttgccaaaatagcgaggccgtaagttccgattttgttggccgtatctccgtttttagcaattctgtcagcgccgacaatgactgctgatatatgtttttccttcattgtatgggcggccatgctgtccgtaatgagtgtgacatcaattccgccctgcatcagctcccacgccgtcagccgggatccctggagaacgggtcttgtttcacatgcgtagatatgaaggccgaggtctttttgtttcgctaagtaaaagggagcaagcgccgtaccgtaccggcttgtagcaatcgagcccgcattgcagatggtcatgatctggtcgccttttttaaaaaggtgcagcgcattttggccgatcattcggcaggtttcttcatcctcaatctgaatttgaatagcttcatgaacgagcgttgttttcgcttcattgattgagattgcatccctgatggaatccgtcagtctgtcaagcgcccacgcgaggttgacggcagtgggcctcgaactgtttaaatacgctttgacatccgcgaactgacgtcggaaatctgaaaggtcgcgggcttcaaatgacttggcggagagcgcgagtccgaatgccgcggttataccgatggccggggcgccccttactttcagcgtgacaatcgcgtcgaatacatcttcctttgtttcaagttccacatactcagtgacgtcgggaagtttttgctgatttaaaatgcggatgtaggtttctttccattccacggaacgggggatggcaaattcattggtcatgctgcatcattcctttacacggagcttaaattggtccagaacttcggtgatatgcttcagttcttttctgttttcgatataataggcgccgatctcaagcgccagcttcttccgttcgattcgtttgtcaaacggagtgatttcatctaagtcagccacatgggcgagtccgatcgtgcgccggatcaattcgcatcccgcaaaaccgaccgcttcctcaaacgcgtttttcagtgtgtcttccagcaggtgtctgtgggaaggcaggcagtctttctcccatgcttcactgaatgttttcacaaatgtatcccatacggcggcagtatggtcatataacggctgtctgtcgtcaccgtcgcggctgagggcgtttaacagcagattggcgataaattggccgatgtcaaacccgatcggtccgaagaaagcaaactcgggatcaatcacctttgtttcatgttcatcggcgaagatgcttcccgtgtgcagatcgccgtgaaccaatgtttccgcggaattcagaaagatggctttcaattcgtcagcgccttctttcagccgggaattgttccaaactttttctgcgtacgggcgcagctcctcttcaaaatcgttggtctcatggtcgagaaacggttctgtaaacacaagcctttctgtaatattgcaaagctcaggatttgtaaactgctttgcgagctgctgctttactttcgcatcaagcgcataatcggatgagtaaaaaagcgttttccctaaaaattcaccgatatgaaccgataagttcggataatgctgcccttccagcagcccttttcttgaaatctgcaaatgtgagaggtcttccattaccgtgacggccatttcagtatcggaatagtaaacggccggaacgaggtgcggcacgtgttcgccctggcggatgagggcgctgctttcgattctcgcccgatcaattgtaagcggccagctttcaccgacgactttcgcgtaaggaatcgcctgtttgataatcagtcctttttggttttctttatcgtaaacatgaaagacgtaatttaaattgccgtcgccgatttcacggcatgtcagagtgcttttgctttggaataagccgagcttgacggctaacgcggcggcggagctttctgttaattgttcataaagacttgttttagttgctgacatggatttaccctccaattatgtagtggcagtaagagatcgtgacggagaatacgcccgaaaaaaagcctccttctctgaaagagaaggaggctgaaacagtgcagtccgcctcttatctctcagataacatctgatggaattagcaccgtgccttatgagacaatcgtctcggcgcaaaatgtacgcgccccatttcacaatggaattacggtcggttgctgttggggtcaaaaggccaattccctcgcccaactctcgataagagaaaatatattgatttgtatcacaattcggattaatcagttgatgaaaatattagcaggtgccggatattcttgtcaacatttttttgaaaattaatataaatcacgccgcaagtcttggaaaaccggaatggttccgcggacggccgcgctttctgacacatcgatttccgcccggactgcgccttccgtccggtctccttcggctaaaatccggccccacgggtcaataatcaggctgtggccggcaaattcattatcgggattggaccccgtgcagttagaggctgcgacaaaacattggttttcaattgctctggcgataagcaggcttcgccaatgatcaaggcggggcagaggccattccgcagagataaacaggacattcgcgccctgggacgtatgctttctgatccattcggggaaacggatatcatagcagatcagcccggcgcacttgacaccgtcgagctcaaaggaaccgtcgctgtttcccgctgacaagtaaaggtgttcatccatcagctgaaacagatgggctttctgataccgcttcacgatctgtccgctgttatcggcgatgtacatggtgttatagacattttcgccttctttgaccgcaaaagatccggcaacgaggtgtacgttgtatgtttttgccgtttctttaagccattgttccgaaactttgccgttttcatccgccagctggtctagccgtgtgagatcatagccggtcgtccacaactcaggaagcacgattacatccgcatggcggctttcttgctcaatcaaagattccgcttttttaaaattttctgaaggatttccgtatgaaatatcaaattgcaaacaggaaacggtccatttcattttttaacacctcaagtttctctttactttttttatttaaccatatatgatgatggactatcatttcaagacatttttagaaggtgaaaaatatgaactttgaaatctcagatgtactcaaacagctgccggaacaatttttcgcatcattggtgcaaaaagtaaatcaaaagctgaaagaaggcagagacgtcatcaatttagggcagggaaaccctgatcagccgacgcctcagcatatcgttgaagaaatgaagcgcgccgtcgaaaggccggaaaatcataaatactcatcattccggggcgcttacagcttcaaaaaagcagccgctgcattttatgaaagggagtacggggtcacgcttgatccggacacggaagtcgccgtgctgttcggaggcaaggcgggacttgttgagcttccgcaatgtcttttaaacccgggagataccattctggtgcctgatcccggatatcctgattactggtcgggcgtcgcccttgcgaaagcgaaaatggaaatgatgccgctgacggaagaaagagggtttctccctgattacagcgtaattcctgaaaaggtgcggagcgaggcgaagctgctgtatctcaattatccgaataatccgaccggcgctgtggcgacagaggcgttttttgaggagacggtcggttttgcggaacaaaacggtatttgtgtcgttcacgatttcgcgtacggagccgtcggctttgacgggcataaaccgctgagctttttgcagacggaaggcgcaaaggagacgggaatcgaagtctataccttgtccaaaacgtataatatggcgggctggcgggtcggatttgccgtcggaaacgcttctgtcatcgaagcgatcaatctttatcaggatcatatgtttgtcagcctgtttcccgcggcgcagcaggcggcggcagccgctcttttagaggatcaggcatgcgtcgcagcgcaaaatgacagatatgaatcgaggcgcaatgcatggattgaagcctgccgcggtatcggctgggatgtgacggctccggctggctccttttttgcatggctccctgtgcccgacggttatacgtcacagtcgttttcagatctgctgctcgagaaagcggatgtcgccgtcgctgccggaaacgggttcggaaaatggggggaaggctatataagagtcggtcttctgacaagtgaagaaagacttaaagaagctgcggaacggatcgggaaactgaatcttttcacccgaaaaagcattgacatatctggataacaatgcgataattcaaaatactttataaaatcattattcttatcaagagcaggcagagggacgagcccgatgaagcccggcaaccgactgataaagcacggtgctaattcttgcagcaggagctgagagataagattcggacataacacgaagcctctttctgctcatacggaagaggtttttttatgttttgtgaaagaaagagaggcgttcacgcatgagcgaagtattggcaacatatcttctgacagacacaacggacagtgaaaagcgggcggaacagattgcggcggggctgacggtaggctcctggactgacctgcccctggtgaagcaggaacagctcagaaaacataaaggccgggtcgtaaaagttgaggagaaagaaggaacctcagaaaacgaaacacaatccgtcatcactatcgcctatcccgaggcgaacttttcaagagatattccggccgtcctgacgacggtattcggaaagctgtcattggacggaaaaataaaattgactgatcttgaattttccgaagggtttaaacgctcccttcccgggccgaaattcggtatatacggcatccgcaaactgctgggcgaatttgaaagaccgcttctgatgagcatatttaaaggcgtgatcggacggaatctcgccgacattaaagaacagctcagacagcaggcgctcggaggcgtggatctgattaaagatgacgaaattttctttgaaaatgaactggctccgtttgaaacccgcattatcgaaggaaaacaagtcctgaaggaaacccgggaggagacggggcataaaacgctgtatgccgtaaaccttacgggaaggaccgctgaactgcgggataaagcgaggcgcgcggcagaactcggggcggacgcgcttttattgaatgtgttcgcttacggtttagatgtgatgcagagccttgcagaagacagggaaatcccgcttccgatcatggcgcatccggcagtcagcggcgcgttcacttcatctcccgtttacggcttgtcgcatgcgcttttgctcggcaagctgaaccgctattgcggcgctgatttcagtttatttccgtcaccttacggatccgttgctcttccgaaggagtccgcgcttgcaatccatgatgaatgtgtaaaagacgatgtctttcatccgtcgtttgccgtcccgtcggcaggcattcatcccggtatggtgccattgttgatgcgcgatttcggcatcgatcacatcatcaatgccggcggaggcattcacggccatccgaaaggagccgagggcggcggaagagcgttccgcgccatcattgatgcggtgcttgaagcgcagccgattgaagaaaaagccgcgtcgtgcaaagatcttcagctcgcattagacaaatggggaagggtggaagccgtatgacccgcacaccgctgattatttgtgatttcgacggaacggtcaccatgaacgacaacattgtcagcatgatgaaagaattcgcgccccctgagtggattgaattaaaagacggtgttctgtctaaaagcctatcaatccaagaaggagtcggccggatgttcggactgctgccgagcagcttaaaagaagaactgacagactttattctgaaggatgcgaaaatacgggacggctttttggattttgtctcgtttgtccggtcaaacggcctcccgttttatatcgtaagcggaggaatggacttttttgtgcatccgcttttggaagggatcgtagaaaaggagcggattttctgcaatcatgcatcctttgacaatgaatatattcatatagactggccgcacgcctgtgacggaggctgcaccaatcaatgcggctgctgcaaaccgtcagtcatccggaagctgtccgatcagcagaaatttctcattatgatcggtgattcggtcacggatgttgaggctgcaaagttatccgatatgtgttttgcgagagattatcttttgactgaatgcaaagaactcggcctccggcatctgccttttcaagattttcatgaggtgaaaacaggcattgaaaacatcggggaggtgcaggcgtggctgtaaaagaagaacgctggcgcgaacttgccgaggtaaagcgcgagctggccgaaagagactggttcccggcaacgagcgggaatctttccatcaaagtatccgacgcgccgctgactttcctcgttacggcgagcggaaaagacaaacgaaaagaaacagacgaagattttctcttaatcgatgagaacgggaagcccgctgagaccggccattctttaaaaccttcagcggaaacgcttctccatacttacttataccaaaagacagaagccggctgctgtctgcatgtccataccgttaataataatgtcatctcagagctttacggggatgaaaaacaaatcacgtttcaggggcaggagatgattaaggcgctcggattatgggaggaaaacgcgtccgtgaccgttccgatcattgacaacccggcgcacatcccggcattggccgaaaacttcgcgcaccatgcggacgccggctcaggcgcggtgttaatccgtaatcacggcattacggcatgggggcggaccgcatttgaagcgaaaagggtgctggaagcctatgaatttttattcagctgccacctcaagcttctgtcactgcggccgcagcttgtaaaataaaaggaggaacggaaaatggcgaccatcagaatacatgacgaaaagaatacgctcattgaaaatcaggaagaagtagcgcgctttttagacgaacaagaggtgatctatgagcagtggaacattgaaaaacttccgtctgagctttcggagaaatacaatctgacagaagatgaaaaagaacggattctcgcggcgtttgacacggagattcaggacatttcagcccggcgcggatatcagtctcaggatgtcatttctttatcagataccacgccgaatcttgatgaattattaaaaaatttccaaagagaacatcaccacacggatgatgaagtccgctttatcgtcagcggacacggcatcttcgtcattcaaggcaaagacggcacatttttcgacgtccgtttaaatccgggcgatttgatttcagttccggagaacatccgccactactttacgcttcaggaagaccgccgggtcgtcgcaatccgaattttcgtgacgactgagggctgggtgccgatttacgaaaatgaaagtgtgcaaaactgatagacgcccgaacctctcatgcccccgccggtatgagaggttttttattgtaatataaagtcagctgtggctgttttttaaatcttgaatatgccgcattctgtttatatcattacctgaatgggtattattctcgtattcatgctaaagattccaatatgaaatgaaaaaataagttatttagtaaaaaaatgtttacaaataaagtataatctgtaataatgctcaataacccaatcaaacttgtttcctattcttttagcggtgaggggtgaagtgaatgggcagttattctgaacaagaaaaattgcttgtatctattgataaaaaaagaaaaatgatgatagatgcggctaacagacaagggtttaccggatatgacacgatcaggcacagccaggaactggactgtctgatgaacgcgtatcagcagctggtaaaccgtgatcgcacacatcaccaaggaatacagggccttgtgaagaaaataggcttgttctcccgcggtgacgtcatgcctgcatatgaagcaaacaaatgattgatgataaaacagataacgaagactgaatgcgcttcctgatcaagcgccgcatccgaaagatgaccgcgtacagtcagcagatttttccgctggcacggctcacgaagcgcctcgtactatctgccggctatgatgccgttcctctggtatatcctcttacacatattcttctttaaataaaaaacaccccgacccagggtgtttttttcatcgtgaagcggcaggaagggtaatggtgacctctgtgcccttatcgacttcgctttgaatgtcaatcgaaccgccgtacatcagcatgattcgtttacatacgacaaggccgaggccggtgcctttttcctttgacgttacaaacggaagaaaaatgtgttcaagcatatcttcagaaatgcccattccgttgtcggccaccttaatgactgctttatggtcgcgggcttctaaatagatggacagccggccgccttcctgcatggattccagcgcgttttttgcgacatttaaaatcacctgtttaatatggtctttcgtgcagttgaccttgagcggccgattgacgagaatctccacattcacttccacattatacagattcccttcagaataaataatcggcataatctcatcaagaatatcctgcagcgagttcacttccaaccgttcagcagtgggtttaccgagcactaaaaactcactgacaatctgattgatccgtttaatctcctgctcaataattgagaaatacagctgatcttcctccgatttgtattttttctgcaaaagctgaatgaagccgctgatccctgtaagcgggttgcggatttcatgggcggtgctggcggcaagcgttccgatcagctccaatttctgcgcttcattttgagcgcgctccagctgggtcttgcgcttaagcagataatattggacgaggatgaacagaatattcagcagcacggcaatactggacatcggcagcagtacgcttttggtcagctcgttcagctcaaccggtttcggataaacattgatattccaattaatatcatccagatagccgctgaccggtttcaccccttctgattgatcagcccgtccgctggcaaatatcactttattctgattggttgccttgacataaacgtcagggctcagcatattgatcatatttctcaaataatcgacttgaatggcggctactaaataatccgtgacttcccgttttgcgtctaacaccggcacgcagatcgtgaagatgcgctggcctgtaattctgctggagtagtcatttgtgataaccgtttttttcgtctttttcgccttcgtaaaatacggtcggtcggccaaattcacctttgatttcagatcagtcgtgcttgcgatgacatcacctttggaattcagcatatacagaccgctgaatctgggttcatcctcaaaagcctgatcgagaatatcaatgatcttttcttcattgacaggcttatcgacagcgatcgcaagtgttgtcatccgggcttttgtttcaccgattaaataattgagcttattgcggtgaaggttgagcatcatactggcttcctgtatgtgtttatcggctattttctgcttttctttttcataaatgaaaaagctgataataagtgccgggatgatcaccaatatgagataaagtttgatctttccccgggcacctttaaatgtattcactctgcatcgctccaacattacacttgaatagaggtattatatcatttttatacttctttaataagaaaaaataaccaaaatgatagaaaaacaaattattttattaaggccagacaaaaagaagagaaattttggaaacatttttgttgacatttttcattttgtttattaatgtttctctgtaacggtttcttttgtaaaaggatgattgaatgtatgacggataaaacagaaaactcattgaaattatttattgtactgtcacgtgcgtaccgatctattaacgaccatatgaataaacatattcataagcacggtctgaacccgacggaatttgcggtgcttgagctgctgtaccacaaaggcaaccagccgcttcagcagatcggcgacaaaattttattagcgagcggaagtattacatatgttgttgacaaattagagaaaaaagaacttctcatcagaaaagcctcgccgactgacagaagagtgactttcgcacaaatttccgaaaagggaatccgtcttttggacgatattttccctgatcatgctgaagaaattaaagaaatgatcagtgtgctgagtgatgaagagatagaaatgtgtacggaaatgctgaaaagagtggggttaaacgctaaacattttcatcagaaataaaaaaggaagccgtttgaaaggcttccttttttatattactgattttggtcagtcgcggcgtttctaggctgtatcaatacctcgacgcgcctgtttttgctgcgcccttcagcggttttgttcgacacggccggtttatactctccgaaacctttggcgctgaatacttttgcgtcaagtttcgggttttccgtgagaatagccatgaagttgacggcccgcatgacgcttaaatgccagttagattgatattgtgagtttttaatcggcacattgtccgtatgtccgctgatgataatattcctcggcggattcagcacaaggagattcgagatttccttggcaagcggaatatcttcctgacggatgtccgcccgtccggaatcaaaaaagatactgtctttaatggtaattaagagtccttctttagtcagctttgtttccagctgagtttcaagctttttgttttttataaattgattgacttgcttttgcacgccttcaagttcttcgcggtcggctgcttctctttctttctttttctgttctttatctttttccttgtctttttttaactgatcaacgccgtctttttcgttttcaggaggggtgacgcttgaatattcaagaacacccgtgcctccggtaaacacggcgttaaatgatttagacagcatttggaatttcgccgcatcgaccgagctcatggcgaacaatacaatgaacagagccaaaagaagggtgagcaaatccgcgtacgggatcagccaagactcatccacatgctcgtcatcatgcttcttcttcttttttctcgccattgtttgcctctccttcttgttcagcgacttttgcgcgttcattcgcaggaagatacatgagaagtttttgttcgatcactttcggggcctgtccttcaagcactgacagaacgccttcgatcatgatttcacgcagtttgacttcctgctttgatttgcgtttcagtttgttggcgaagggatgccatagtacatatcctgtgaaaatcccgagaagggtggcgacaaacgccgcactgatggcatgtccgagcgcctcggtattgttcatgttggaaagagcggcgataaggccgatgaccgcacccaaaacgccgagtgtcggcgcatatgtgccggcttgtgtaaagatggctgcgccggcctggtgtctgtcttccatcgcttcaacttcttcagtcataatatctctgataaattctgcgctttgtccgtcaaccgccatgctcaggccgttttttaaaaatgcgtcatccacgtcttcaatgcttgcttccaatgcgagcagaccttcacgtctggcgatttgcgcccattgagagaacataggaattagttgcgcaattgtcagctgtttgttttctttaaacagcactttaaaaagggcaggcacttttttgatttcttttccggggaatgcgatgatcaccgcagaaatcgtaccgaacaaaataatcagaatagctgccgggttagcgagtgcgcttaagctgacccctttcagcaccatgcccacgcttaaagcaatcactgcgaggatgataccgataatcgatgttttatccatagttttcaccaaatcctttatactagctttctatggttaatatcggtggcagtgcatggaactttagggtgattgaaaaattgttcccgaattcttcacagtttctcccttccggcatggagaaagaaacaaaaaagcagctccccgcgaggagggaaccgcttttttcttattgtgcccggactttgatgccgtcctcttccattacgacatggaaggctttgatttcgttgtcatccaatagaagatctgtcatttcgtcctcgatcaattcttggatggttcttctgagcgggcgtgctccgaaagcggggtggtagccgatttcagcgattttttccttcgcatcatcggtgacgctcaggctgatgccgcgctcttttaatgtgtcttcaagctctgtgagaagcaggctgacgattttcacgagatgttcttttttcagggattggaattcaataatgctgtcaaaccggtttaaaaactccggtttgaagaacgcgctcagtgaatcaatcagcgtttgttcttccatgacgctctcttcagattggaatccgactttcacctgtttttcgccggttccagcgttgcttgtcataatcaaaacggtatctttaaagctgaccgttctgccctggctgtctgtcagacggccgtcctccataatctgcagaaacatatgctggacatcagggtgggctttttcaatctcatcgagcagcacgatgctgtacggattgcggcgcactttttccgttaattgaccggcttcatcgtgtccgacatatcccggcggtgaaccgataatttttgatacggcgtgtttttccatgtattcactcatatcgagacggataatggaatcttttgtaccgaacagttcatctgcgagtgtctttgataactcggtttttccgactccggtcggtccgacaaagaggaaggagccgacaggtctgtttttggattttaaaccggcgcggcttcgtctgactgctttcgccacttttttcacggctttttcctgaccgatgacacgctgatgaagatgctcttcaagttccttcattttgacttgttcatcagcctggagttttccgaccggaatgcctgttttttgttcaatgatggcttgaatatgctccgcgccgatttcaggtgaagaggccggtgtttcatgcgccagctgcttttccaaagctgcttcttcatcacgcagtttcgcggcaagctcataattttcttcctgaagcgcttttgttttctccgcgtcaattgcattgagtctctcagccgcatcttcttcatttacggtatcaagttccaggttcgccttagagccggcttcatctaataagtcgatcgctttatccggcaggtggcggtcctgaatgtaacgggatgaaagcgtaacacaggcgtttatcgcttcattgctgaatgtgacgccgtggtatttctcgtatttatctttaatgccttccagaatgctgatggcttgttctattgtaggctcgtgaaccatgacaggctggaagcgtctttcaagcgccgcatctttttcaatctggcggtactctttcagcgttgtcgccccgatgacctgcagctcgcctctggcaagcgccggtttcaggatgttcccggcatccattgatccctcggcagagccggcacctacaagaaggtgaatctcatcaatgaacaagatgacatttttccgttcttttaattcgttcattaattgtttcattctttcttcaaactggcctctgatccctgtattggcgacgagagaagcgacgtcaagcaggtaaagctctttgtttttcaacttgttcggcacatcgccttcagcgattttaagcgcgaggccttctgcaatagccgttttaccgacgcccggctcaccgatcagcaccggattgtttttattccggcggttcaaaatttcaattacgcgcgccacttcattatcgcggccgatcacagggtcaatcagacctgcttttgcgccgtttgtgacgttttgagcgagctcgtcaagcaggcctttttcagggccggcctgctgtttattttgattgggagcgaaaccttgctcaaacgggaatccgaatgattgcggccccatgctcatagacggttttcgggttaattctgtataacatgtttcacataaaacgaattgtttttgaatggaattgacttgcatgttcaggcgaatcgtcgcctcgtttttctgacaatgttgacaacgcatttgccaaaacctcctcgaaaaatatttgatcatctttgaccaaatgggttagaaaataaggtcgaaactttgaccttctttgattattagtatactctgaccttctttgactttcaagtattttgtttcaaaccccgaaaaataaatgtttacagcatgataagtgatattcgtgaggtttgattatttttgaccaatatagtcggaaaggaaatgaaatgctttgacctttcttgatgaagagtatacgccggccctttttttctttcaatatttttgcttagaggagagagctgaatctgttttttccggggaaggacgatttgttcgtcttttcgggagacttgtctcataagcatatataaaggcctggacaaatctgcgtttagccggagggtgaaatgggacaaacaaaaggttctgcaagtcagcttgcatttgtatacgtaggcacggttgtaggagccggttttgccacgggacgggaaatcgttgagttttttctgaagtttggctggatcggtctgttcggtatcgtggtaagcggtctgatgtttacatatttaggcgccaaaatcatgattatttccaaacggattcatgcagcatcttatcaggaattgaacacatatttattcggccagtccatcggccgcgccgtgaacatgtttatgatgtttatattgctgggagtgacctctgtcatgctgtccggagccggagcgctgtttcatgaacagcttggctggcccgcacaagcggggatcctactgacgatcgtactgagttttgccgtcatgacaagcggtgttaaaggtgtgttcggcgtcaatatattggtggtgccgcttttaatttctttctcttttatcgtgacagctgattcatttgtatttacaagcacgagaaacgcggacgaatgggtatggcctgacaagtggaactggcttttgtccgccgtctcttacggcgcgttaaatttatcgctcgcccaagccgtccttgtgccgcttgcgaacgaaatgtcttcagagaaggtgatcagaaggggagcttatataggcggcgttctgttgacactggtgcttgccgcgagctttttatcattatcggtgctgccggatgtgctggagtttgacattccgatggctcaagttgtctattcgtattcgcgttcgcttcatatcatttatttgtttattattttcggggaagtgtttacgtcggttatcggcaatttatacggattggaaaaacaattaaacagttttcttcatataaaaagtacatatatttacggcggcattttggcgtttgctttcattatcagccaaatcggttacggacagctgatttccaccgtttatccggtgtttgggtatgtgagcctcgcttttatgggcgcattgatttgcaaaaaaatcccgaaagaaaaataaggaaaatgtctgtatattttgggaattcccttcttttttcctgccatttctgtataatgaattgggaaatgatggggaggagtaagagatgaaggatcgacgtgtattattgggatttatttttatttgtatcggcattacgttttttttacagaaggcgggagttatacatatatccgcaggttcggcgtggccgtttcttttcattataatgtccgcagggtttcacgccggatttatttttgcgaaaaaaacgcctgaacaggcgggactgctcgttcccggcggtatgtttcttgtgctgggctgcctgttttgttttgagaccgcaacgggatggacgtattcaggcatgacgtggcctgtttatatatgggcgcctgctctcggtctgtttgagctgtggtatttcggcgggagaaagatcggcgtattgattcctgcttttatcctgacagccgcgggagcactatgctttgccggtatgctgatgacggggctgtggccgcttttgatcatcgcagccgcgcttttgtttcacgccgctgcctttatgcaaccgaaaaaaagatcgggccttcttattccgggcggcattttgcttgtgacgggcggcttgttatggtttgaaacgctgacggattggacatacgcaacgatgacatcgcctgtttacctctttgccgttgcattcgggctgtttgaagcctggctgttcggcagaaggcaaagagggcttttgactgctgcggcggttctgtgcgccgcgggcattttcggcatattcaccaatgcaaatgaagtcatcagcgaacgcggctggcccgctctcattctgttgctgggcgccgcttttcacattccgattttcggcccgaaacctgtcaaaaacgcggggcttctcgtaccgggcggcatcttattgatcacggggatcttgtttgtctttgaaacggcaaccaattggttctactccgatgtgacatggcctgtttacctgttggcaacggcattcggtttatttgagctgtggctgttcggcgggaaacagaaggcgctgctcattccggttgcagtgctgaccttgacagcactttgctttatgatgacgtatcagccgatcattccggtttctgttttctggcctgctttatttgttctgatcgggattgcgctgatggcatttccggggaagaaacgcggggcttaaacccgcttttgcagcctgacacagggttcaggctgtttttttattgtcacgggaaacaacattatggtatgatagcaaaagtgaaaaaagaagaaaatccgtattgatgcgggagaggttctagctacaccctctataaaaaactaaggacgagctgtatccttggatacggtttttttatgttttttagggcgccttctccgaaaaaggcgctttttttatggaatgatagataagggagagaaagacatgaaaaaagaaaaagcggttgtggtgttcagcggaggccaagacagcacgacttgtttattatgggctttgcaaaactttgaagaagtggaaaccgttacattccattataatcagcgtcaccaagaagaaatcgatgtggcaaaatcgattgccgaaaagctcggtgtcaaaaaccacttgcttgatatgtctcttttaaatcagcttgcgccgaatgcgctgacaagagatgatatcgaaattgaagcgaaggacggggaattgccgacaacctttgtaccgggacgcaaccttgtatttttatcctttgcatcgattcttgcatatcaaatcggcgcgcgccacattattaccggtgtttgcgagactgatttcagcggctacccggactgccgtgacgagtttgtcaaatcctgcaacgtcaccgtcaacttggcgatggaaaagccgttcgtcattcatacgccccttatgtggctgaacaaagcagaaacgtggaaacttgcggatgagctcggcgcgcttgattttgtaaagaataacacactgacttgctataacggcatcattgcggacggatgcggcgaatgcccggcatgcctgctccgcaataaaggatatgatgaatatatgaaaatgaaaggagagcggaactaattgctttctcaaatttacccgcaggttcagcatccttattcgtttgagttgaataaggacatgcacatttcagccgcgcactttattccccgcgaaagcgccggagcgtgcagcagagtccacgggcacacgtatacagtaaatattacagttgcgggggatgaactggacgattcaggctttctcgtgaatttcagcgtgctgaagaaattggtgcacggcgcttatgaccatacattgctgaatgaccatgaggaattttctgatgatgacagatattcactgccgacgaccgaggtcgtagccaaaacgatttatgataaggtgcagtcctacctcgaaacactggagaatcagccggtctgcgtgcaggtttttgtcagggaaaccccgacaagctattgcgtataccgcccgaaaaaaggtgataggaatggctaaaggaattccggtattagaaattttcggaccgacgatacaaggggagggcatggttatcggccagaaaaccatgttcgtccgcacggcgggctgtgactactcctgcagctggtgcgactccgcttttacatgggacggatcagccaaaaaagatatccgctggatgacggcggaagacatttaccgcgagctgagagaaatcggcggagacgccttttctcatgtcaccatctcaggaggaaacccggcgctgttaaagcagcttgacgcgctgattctgctgctgaaagagcacggggtgcgcgccgctttagaaacgcagggaacagtctatcaggattggttcacaatgattaacgacctgacgatttcaccgaagccgccaagttcggggatgacaaccgattttgcaaagctcgatcatattatgtcttcgcttgatgcggcagaaaggcttaacgcggtcagcttaaaggtcgtcatttttaatgatgaagatctgcaattcgcgaaaaccgtgcacaagcggtatccgaatatcccgttttatcttcaggtcggaaacgataacgtccatacgacggacgaccgggcattgatcgcacatctgctcggaaaatacgaaacactcgttgataaggtttcagccgattcggatctgaatctcgtcagagtcctgcctcagctgcatacgctgctttggggcaataaacggggagtttaatagaaagggagatttatatgacaagaaaagaatcagaattagaaggagttacgctcctggggaatcaagggacaaactatttatttgaatatgcgccggaggttttggaatcatttccgaataaacacgtgaaccgtgattatttcgttaaattcaactgcccggaatttacgtcgctttgcccgaaaacgggacagccggattttgcaaccatctacatcagctatattccggatgaaaaaatggtggaaagcaaatcgttaaagctgtatcttttcagcttccgcaaccacggagatttccacgaggactgcatgaacatcatcatgaatgacttgatcgaattaatggacccccgctacattgaagtatggggcaaattcacgccaagaggcggaatctccattgacccgtatacaaactacggcagaccgggaacaaaatacgaaaaaatggccgaacatcggatgatgaatcatgatatgtatccggagacgattgataatcgttaatttcagacggagtacggactcggactataacctaaatacccccgccttttaagcgggggtatttttcgtctctgccacgcagccaaaaaggtgcatgatatttgcacagaacttctataaggaaaagagagatcatttggagaaaagaaaaagacgagtaaacccggggggagtgtactcgccgcttcaatacgtgacgggtgctggatggcagctcgtctgtttcattataaaatagggaacgtatgtttgtaaaggactgcgctgttttttcttattcggagcggatcaattgtaaaggaatggccagcatggtagcatgtcctgtaaaaagaaggagtgttcgttatggagccgttagagttaaacggtgtaaggctgaaaatgtatgattgtaaagaaagtgcgggtaaaaacggccgtatgatttcattcgtattgaaggtgacctctgaaacgtatcatgatattgccgtccttttgtatgaaaaaacatttgacatcaaggcgcccgagcgtgggcttgaattccgcggtaaaataaccaactactatacatccgtcacaaatctttacaataaagatgagaccgatgatttttttgtggaaatgaccgagatctgaattcatttgaaaaagctgccgggcggcagcttttgtgcgggatatgtaaatggttcggattgttcgggggtttaataggagtctctgatgattttataattcttatggttgacgacagtgagggaatctaattcaaggtcacgataattatccatgatggttacatcaacgatgacggagttttcatttactttttcaacaataccggttaatccgtttttaaattcaatgacgtttccaaccttagcaattttcacgagcttcctctcctttatcataaatcctgtttgaaaatattttgcagtattttctttaagaagtaaagcgatatgggtatcagcccgctcaatcattgtcccggcgggggaaagatggtatattgtttttcgggaaaaagccgagaaaaggaggctgtattcgttgctgcctgaggaaatttcagaacgtatcaaccaaatgcgcatcggtgaaatcaaagaattcagggtgcagaaagaacattttcttgcatttcgagcggttttgtcgaagcaggaagattttaagcatttccgcggtattgcccagcagggcggagatgttatcttccagtatttagaacagccaagaagctgacggctcctcgcacttgaggagtctttttttgttttcgctgcttatttcatctggctgtaacagatgtaaacaaaatgtaaaatccctccgatggatacttttactgctatttggttaatgttgtgaaaatgacggctgttttcctgccaataacaaggctgttaacaaacttcttccatcataaaagctgattgggagcattggaaaatctttaaccgtgaatttgcgtacagctcttgttaaggtagtgaagtatttaaggaggaaatcgtatgacgacaaaatttgctgccttggctgtcttttttctatgttttatgcctgcatcaaaaattgaacatacagaagctctgtttacttttgcgaagaagccaaagcaagaacccagcacactggttgctgatttaaataaaaaaagcccggttccgaagctctcagaaacggatcataagcactctatccaaccgataaagctgtcatctcaccaagagaagaaagcaaaaccggacgagacggcttatcagccgccgaaaaaaacgtattcccgcgctgacagacagctcctgtcacgtctcgttcacgcagaagcgaaaggtgaatcttataaagggaaggttgcggtagccagcgtagtgctgaaccgtactgaaaaaaacggtttcccggataccattcggggcgtgatctatcaaaggaatgcatttgaaccggtagcaaacggaagcattaatcaaaagccggataaggattccatcgccgccgcaaatgaggcgctagaccatccgggcagagaaacgaacgcgttgtttttctacaatccgaaaacggcatctgaccactggatccgttcccgaaaaattatcgaacggatcggcagacacgtatttgcgatgtaagaagcatagcgggataaaaaatatccccgctatgcttttttcaattttgagaaatcgaaaatattttcagaacttgtctcatatgatgatggaagaacgtgagacaaggagagacaccatgaatcgatttgtgaaagggatcattcttttatccatcgccgcctttttcgcggaatgtctggaatttgtcgtgaatatgatactggcgcgggagcttggcgagcatgggatggggctttacatgagcattctgcccaccatttttttaattatcgtgatcgccagtctggagcttccgatctctatttcaaaattcatcgcggaatccaatcagaagctgcatgaaagcatgcttcggcatgccttcagaatgaccgccgtttttaccgcgttttcaaccgcggccgcaagcatcgcgctgccgttcattcctgtattcgatacgtatcacccgtttattaaagggattgtcatcgggctgattccagtcgtcgcttttacatccatcgccagaggttattttatgggtgtgcagcaaatgggaaaaatcgcggttgcgaatgtcttgaaaaaaatcattcaagtgctttgtctgtttatcttttttcaatggtactcttttgaaattgatatggccgtgcttatttcgttatttgtgctggtcgcaagcgatgttgtggtgttcgtttatctgtatacgcagtttattttggcgcggagggcgctttccggccatcagcacattcatcttcgcgggaaagacgtgcggaaacgcctcctggccgtatccatcccgacaacgggacttcgtatatttcatgcggtgacaaacgcaattgaacccttcttggttaaaggagcgctgctggcgtccggggcagccgggaccgccgcgattgatcaatacggaatgcttgccggtgtagcgatgacaatcggttcgtttcccgcatttatcgcccattcgctgatggtcgttatgattcccagcatttcagaagcgtatgcgctgtcccaatatgatattgtgctgaaacggctgagacaagcgatttttattacattcggctacggcattccggcggtctgggtcatgtttcagttcgcgggcccgctgacccatttgttttttcagtctccggaagcgcagtattatttgcagcttttgtggccgttttttctttttcatctgtttgtgatgccgcttcaagcctgtctgatcggcatcggccacgtgaaaacggcgttttatcataacgtatggagcagcattgtaggtctttcaatgatgtatgtgctcggttctatgccggaattgcaaatgctcggcattatactcggtatgaataccggcatgattcttctgacaagtttacattacgtgacgatctgcaaagacctcggtgtctccgtgtttttgacgggcggcggaagaacagctccccggatcgaaagctgaaaaggctgatacatttcaataaggaagggcaagctatccgaaacgcgtgaaaggaagatcatatgcataaaaaccgtctaattgtatgtgcagtccttttgatagctgccgccgtttggatgcctgaagcaaaagcctcatcagaaaaacaggcagttcccgccgtgtttctgatgaagacgattgaaggagacgaaatatcgattccgaataaagggcagaaaacgattttgcatttttggacatcgtggtgtccgccgtgcaaaaaagaactgccgcaattccaaacctattttgaacagcatcagtctgatgatgtaagccttgtaacggtaaatttgatgaatgccgagcgaaataaaaataccgttcaaaactttgtcactcagcaccatctcacattcccgattgttcttgacacgaaaggcgagcttatgaaggaatacgatgtcatgacgattcccacgtcatttctgctgaatgaaaaaggagaaatcgaaaaaaagatcgtcggtccgatgaccgcctcacaattaaaagaatggtcagagaaataaaaaggtgcgggaggaattcctcccgcaccttttttgcatataatgaacagctgaagaaacactaatgataattattatcataaagaaattaaaacaattataattgaaatcttccgccggcatgctataataaagaaaacactgcgataacactgtgaaaatgctgcctgtcaggcggctgttttacttttatcagggaattgaagatgatttgcgttctcaattagagaggagaattcataatgaatgaacaagtgatgacacaaacccattcacaacagcagaagatacaagaagagcgggccggaaaaaggtggctccagcatgcagaactcattgcggcgctcgtatccggcgtccttattcttgcggcctggttttttaccgaaacaaaaggcctgtccgtcactttgtatatccttgccttcctgatcgggggatttgcaaaagcaaaagagggaattgaggataccattgagacgaaggcgttaaatgtggaactgctgatgatatttgcggctgtcggctccgccctgatcggttattgggcggaaggcgcagttcttatctttattttttcgttaagcggcgcgctcgaaacatatacgatgaataaaagcagccgtgatttaacatccttgatgaaactggaaccggaggaagcgaccctgcttgcggacggacgggaaaagcgggtgccggctgctgaacttaagatcggtgacatgatcgtcattaagccgggcgaacgcgtagcggcagacgggattattgagtctggcgtgacgagcctcgatgaatcggcgctgacgggtgaagcgatgccggcggaaaaaacagcaggagattctgtgtttacaggaacggtaaacggaaacggctccttaacggtccgtgtgacgaaaacaaatgaacagtctttattcagaaaaatcatccggctggtggaatcagcccaaaacagcgtgtcaccggctcaggcatttattgagcgattcgaaagtgtctatgtcaaaggcgtgctgttagccgtggctgtgcttttattcgttcctcatttcgctttaggctggagctggagtgaaaccttttaccgggcgatggtgtttatggtggtcgcctccccgtgcgcgcttgttgcttctattatgcccgctgcgctttcccttatctcaaatggggcccgcaacggattattggttaaaggaagtgtgtttttagagcagctgggaagcgtacggatgatcgcatttgacaaaaccggcacggtcacaaagggacagccggcagtcgcggcatttcaagcagcggaaaatgtgagtgaagatgagatcatgcaggcggtatatgcgatagaaaagcaatcaagccacccgcttgcaaaagcgatagctgaatttgccgaaagccggggcgccgcgcccgcaggccatctatcgattgacgagacgtccggattcggtgttcaggctgaaatagaaggcgtcaaatggatggtcggaaaagcgggatttgcaggtgaacatgcggcagatgcttttttgcagacatcgggaaaagaattaaaggataaaggctttacactggtttttgttaagaaagaagaccggattgcgggctgcttcgccttaaaggatcaaatccggcctgaagccaaagccgtgatggctgagcttgaatcactgggcattcaaacagccatgctcaccggcgatcagtctgaaactgcggctgccatcgcgaaagaggcgggcatgacgacggttgttgccgattgtctgccggaccaaaaggcaaaagaagtgaagaagctgaaagaaacgtacggcacaatcgccatggtcggagacggcattaatgacgcgcccgctctgaaaaccgctgacgtcggtattgcgatgggcgggggcacggacgtggctctagaaacggctgacttagtccttatgaaaaatgatcttcacaagcttgtgaaaatgtgcagactttcaaggaaaatgaaccggattattaagcagaatattgttttctcgctctcggtcatctgccttttgatctgcgctaactttctgcaggtgatggaactgccgtttggcgtaatcggccatgaggggagcacgattctggttatactgaacggactgagattattaaaataaacatgacagccgcacatcgggcggctgtttttttaatgttcgttcacagcataaacgccggaaaactgatagaatgaataaagagtcactttggtaaggaggaaaatcaaaaaatgaacagattagaacgtgtttcatcttggctgaaaaaagaaggacatgatgcggcgtttatacatacaaaggaaaacgtattttatttaactgatttttacacggatccgcatgagcggttaatgggattgttcctgtttcaggaacaggagccgtttttcgtttgtccgggaatggaagacggacaagcccgaagcgccggttgggagcatggtattatcggctacggcgatcacgaagatccgtgggagctgatcaaagccgagctcacaaaacgaaatgtgccgcttgattccatcgcggttgaaaaggattcgatctctctttcccgctcagaacagctcaaacaagcttctgggggcgcggcatttgtttcggcagaagaaacgctcaaccaattccgtctcgtaaaagatgagaaggaaatcagcattctcagggaagcggcaaaactcgcggattacggagttgaagtcggtgtcgcggcgcttaaagagggtgtgagtgaaaccgaagtactcgcgcagattgagtttgagctgaagaaaaaaggtgtgcagggcatgtcattttcaacgatggtgctgttcggggaaaaatcaggccagccccatgggaatccgggtgcagaccggttgaaaaaaggggattttgttctgtttgatctgggcgttattcttgacggctactgttcagacattacgagaacattcgcataccaatcaatcagcccgaaacaggaagagatttacgaaacggtgcttaaagctgaacagacggcgcttcaattaagtaaacccggcgtcagaatcggcgatcttgatttaaaagcccgcggcattattgaaaaagccggatacggagactatttcccgcaccgcctcggccacggactcgggatttcggttcacgaatatccatcaatgagcagcgcgaacgacacactcctcaaagaaggcatggtgtacacgatagaaccgggaatttacgtgccggatgtcggcggcgtgcgcatagaagacgatgtgtttgtcacaaaagacggcgccgaagcattaacgcagtatccgaaagaattaacgattctgaaatagaaagctttgtgataaaaaaggacggttctggaacgcagcgtccttttttatcaccttttaaatgaaaaaatcatcaaaatgctgaaatggtttgatgtcatgcttttcattcaggggccgcagggcaaggtaactgccgccgagtatggccagacacaaaccgattaagcaaagaatccccatcgctgttcttctcctttcaaacggataggatgtatctgtttctagcttactgtatgaaacgcattccagatcaagggaaaaaaagaaaggggggacgccatggctacgatcagagacattgccggcgctgccggggtttccgttacaacggtatcaagagttttaaacgatcatccttatgtaagtaaggacaaaagagaaagagtgaaaaaagcgatgcaatcgctcggatacacgcgcaacattcatgctgttcatttatccaaaggtttttccgatatgatcggcgttgtgcttccgtcggtgaaccttccgtattttgcagaccttgttgcaggtattgccgaggctgccgaagcgtcaggcgtgcatctttgtttataccagacagattatgagcagcaaaaagaacgttttgccttatcacaattacaggagcgccaagtggacggcctgattatctgctccaaagcaattcctgatgagcatttgcttgccgtgaaagaaccgctcatcctctgccagtacactgatgcggcagggctttcctccatcagtaatccacatcgggaagcatttcggcacggtctggattatctgatagaaaagggacaccggaaaatagcgatctgcctggccagaaaaaagggaaaaaacagtcaagtccgaatcgccgcatacaaagaggcgctgaagaagatcgggcagccttacagggaagagctggttgtggaaaaggtgctgacgctgcttgacgggaaagccctttttcatagatggaagagctgggatgacaaaccgactgcgctgtttgcggcgaatgatcaagtatccgcaggtctttaccttgaagccaaggcaaacgggacgcgcatcccggaagagcttgcgattttgagcatcgacaatcatgatatcagcaagatgttaggtatttccacaatagatatacaaacgaaagaaatgggaaagcaggcttttcacatgcttgagaaccggatcagcggcgggcctccgggaaggaaagttcttgattaccgccttattgaacgatcaaccgtctaaaaaaagaattgacgcgctttccgttcgttttgtacgatatgaggtattgaatgacaaaggagctgaggatcatgaaggggtcctttacagttgaaaaggtattaaataacaatgtgctcatcgcaacacatgatagatacagtgaggtcgtcttaatcggaaaagggatcggctttggaaaaaaacaagcggatgtcattgaagataaagggtatgacaagatgttcatcttaaaggatgaaaaagaacaaaaacaatttaaaaagctcctcggttatgtggacgagacacttgtcgacatctccaatgacgtcatttatcatatcaagaagcggacaagccaaccgttaaatgagcatatccatattgcgctgactgaccatatcgcctttgcggtaaagcggctgcagcaggggtttgacattaaaaacccgtttctcatggaaaccgaaacgctttatccggaagaattccaaattgcccgtgaagtcgtcggcatgattaatgaaaagacgggaatctgccttcctgaaggagagatcggctttatcgctctgcatatccattccgccctgacgaatcggcccctttcagaggtcaatcagcattcgcagctgatgtcccgccttgttcaggtgattgaggactctttccagatgaaagtgaataaagaaagcgtccactatttgcggctgatccggcatatcagatttaccatagacaggattaatcgggaagagcagacaaaagaaccagaaaagttaatgttattattgaaaaatgaatacccgctatgctacaatactgcttggaaactgataaaaatcttgcagcaaatactgaaaaaaccagttcatgaggcggaagcggtttatctcacgcttcatttgtaccgattaaccaataaaatttcataatttcagttgaaaccttaaaaacgtgtcactgattcgatcaggcatgagtgattgagggtaaaaaacgggaagaacgatcccgttattttgcacaccctttttactcatgccttttttgttgtgtaaaagggcaaatgtaaacggttaaactgaagacttgcgccagtgaattcgttgtcatgaattttcgctgtaaggtcacactagctaacagaggaggtacatcttttatgtttaaagcattattcggcgttctccagaaaatcggccgtgctcttatgcttccggttgcgattttaccggctgcggggatcttgcttgcgttagggaatgccatgcagaacaaagatatgattcaagtcatgcatttcttaagcaatgataacgttcagcttgtggcgaacgtcatggaaagcgccggccaaatcgtatttgacaacctgccgcttctttttgcagtaggggttgcgatcggtcttgccaacggagacggtgttgccggaattgcggccattatcggatacctggtcatgaacgtatccatgagcgccgtgcttatggcgaacggcagtattccgtctgacaaaattgaacgggcaaagttttttgcggaaaaccatccggcctatattaacatgctggggatacccactttggcgactggcgtgttcggcggtattatcgtcggggtcctggccgcgttattgttcaacaagttttataaaattgaacttccgcagtacctcggattctttgcgggtaagcggttcgtcccgattatcacatcaatttccgcattaattctcggacttattatgttagtgatctggcctccgatccagcacggtctgaattccttctccacgggtcttgtggaagcgaatccaaccttggcggcctttattttcgggatgattgagcggtcattgattccgttcggtcttcatcacattttctactcgccgttctggtatgaatttttcagctataaagatgcggccggagacatcatccgcggagatcagcggattttcatggctcagatcaaagacggcgtacagctgacggcgggaacatttatgacggggaaatatccgtttatgatgttcggtcttccggcggcagcgcttgcaatctatcatgaagcgaagcctgaaaagaaaaaacttgtagccggaatcatgggttctgccgctctgacaagtttcttaacgggaattaccgagccgcttgaattctcattcttatttgtggctcctatcctgtttgcgattcactgcgtattcgcgggactttcctttatggttatgcagctgctgcatgtaaaaatcggtatgacgttctcaggcggtctgattgactacttcctgttcggaattctgcctaaccggaccgcttggtggcttgtcattccggtcggcctaggattagccgttatttactacttcggtttccggtttgcgatcagaaagttcaatctgaaaacgccgggccgtgaagaagaggctgcggatgaaggtgcgggcgcctcaggcgaagccggcgaccttccttatgaaatcctgcaggcaatgggtgaccaggaaaacattaagcaccttgacgcttgtatcacgagactccgcgttacggtcaacgaccagaagaaagtggataagactcgtttgaaacagcttggcgcctcaggcgttcttgaagtcggaaacaacattcaggccattttcggcccgcgttctgacggtttaaaaacacagatgcaggatattatcgccggacgcacgccgcgccctgaaccgaaagtatccgcacaagaagaagtcagccagcaggttgaggaggttatcgcagatccgctccgaaacgagcagggtgaagaagtgttcgcttctccgatcaccggcgaaatccatccgattaccgatgtgcctgaccaggtgttctcaggaaaaatgatgggtgacggttttgcgattcttcctgaagaaggaatcgtcgtatcgcctgtccgcggaaaagtgctgaatgttttcccgacaaaacatgcgatcggtcttcagtctgacggcggaagagagatcctgattcatttcggaatcgacacagtcagcctgaaaggcgaaggattcacttcttttgtttcagagggtgaccgggttgaaccggggcaaaagctgcttgaagttgatcttgaagcggttaaacctcatgttccttcattaatgacaccgattgtctttacaaatcttgccgagggtgaagcgatttccctttcggccgaaggtaccgtaaaacgggaacaaaaagatattgtgaaaatcggaaaataagcatataaatacgccgtgcttgtcagatgacaagtacggctgtatgatataatattgtgtagtaaaatagctttaatttaaaggagaatgataatcatggcacaaaaaacatttaaagtaacagcagattccggaatccacgctcgtcctgcgacagttcttgtacagactgcaagcaaatacgatgctgacgtaaacttagaatataacggcaaaacagtaaaccttaagtcaatcatgggcgttatgtctctaggtatcgctaaaggcgctgaaatcacaatttccgcttcaggcgctgacgaaaacgatgctcttaacgctttagaagaaacaatgaaaagcgaaggactcggcgagtaatgcaagaattaaaaggaataggcgcttcagccggaattgcgattgcgaaagcataccggcttgaagagccggacttaacggttgaaaagaaaaacattgctgatgctgcggctgaagtaagccgttttgatgaagcgattgtacgttctaaagaagagcttgaaaaaattaaagagcatgctttaaaagaactgggacaagacaaagctgacattttctccgcgcaccttttagttctgagtgatcctgagctgctgaacccggtaaaggagaaaatcagcacagattcagtcaatgctgaattcgctttgaaagaaacagcttccatgttcgttactatgtttgaatcaatggataacgaatacatgaaagagcgtgcggcggatatccgtgacgtaacaaaacgtgtgacggggcacctgctgggcgtggaaattccgaacccgagcatgatctcagaagaggttgttatcgtggctgaagatttgacaccgtctgatacggcgcaattaaaccgccagtttgtaaaaggttttacaactgatatcggcggacgcacttcacactccgcgatcatggcccgttcgcttgaaattccggctgttgtcggcacaaaagcggctacagggacaattgaaaacggtgttacggtaatcgtagacggcatcgatggtgatgtgatcatcgatccttccagtgaaacgttaaagaaatatgaagaaaagcacagtgcttacctggcgcaaaaagctgagtgggcgaagctcgtcaatgaaccgactgtttcaaaagacggccatcatgtagagcttgccgcaaacatcggcacacctgacgatgtaaaaggcgttcttgaaaacggaggagaagctgtagggctttaccgtacggaattcctttacatgggacgcgaccagcttccgacggaagacgagcagtttgacgcttataaaacggttcttgagcgtatggaaggaaaatcagttgtcgtgcggacattggatatcggcggcgacaaagagcttccttacctgcagctccctaaagaaatgaacccgttcttaggctacagagccatccgcctttgccttgaagagcaagaaatcttcagaactcagcttcgtgcgctgcttcgtgcaagtacatacggaaacttaaaaatcatgttcccgatgattgcgacagtaaacgagtttaaacaggcgaaagcgattcttctcgaagaaaaagaaaaactcgtcgaagccggcgtagcggtttctgacgatattgaagtcggtatgatggtagagattccgtctacagccgttatcgcagatcagtttgctacagaagttgacttcttcagtatcggaacaaatgacttgatccaatacacgatggctgctgaccgcatgaacgagcgcgtagcttatctgtatcagccatacaacccggcgattctccgtctgatcacccttgttattgaagccgctcacaaagagggcaaatgggtcggaatgtgcggagaaatggcgggagacgaaattgcgattccgattcttctcggcttaggcttagatgagttctcaatgagcgctacatccatccttccggcaagaacgcagatcagcaagctttctaaaaaagaagctgaatcattcaaagaaacaatcttgtctatgagcacgacagaagaggttgtcgcattcgttaaagaaacattcaataagtaatacaacagccagacggtataagccgtctggtttttttcatattcggaaaaaagggggaacaataacgttcaacaggagggattattatgacaaaatcatttgcagcgggggatacggtctatgtgatttaccgcaatccgcatgccgccaatgttgcccatattaaagaggcggagatcgtccatcacccatatcatgagggagaactgtctctgtttttatacgaaacctatcatccgctggccgaagatgacgcggtcttttcaacatatgaggaagcggaagcgctttacagcgagctttttgaagaagaccgatatcattgatcaaaggaaatgtttacaacgcatattcactctcttttaaacggaaagtaacaacatgagaatatgaaaaaagggagtgtcagttcatgctgaagccgtttgtgccccagcttgtttatatagaaccgagagcgctcgaatacccgttaggacaagagctgaagaataagtttgaaaatatggggcttgagatcagagaaacaacatcgcataatcaagtccggaatattccggggaaaaatcacttgcagcaataccggaacgcgaaatcaacattggtaatcggcgtccggaaaacactgaaattcgattcttcaaagccgtccgccgaatatgccattccatttgcgacaggctgtatggggcattgccactattgctacctgcagacgacgatggggtcaaagccttacatccggacatatgtcaatgtagaagagattctggatcaggctgatgagtatatgaaagaacgagcgccggaatttacaagatttgaagcctcttgtacgtctgatatcgtcggaatcgatcatctgacacatacattaaaaagagccattgaacatttcggacaaagcgaattggggcagctcagattcgtgactaaatttcaccacgtcgatcatttgcttgatgcaaaacataacggaaagactaggttcagattcagcatcaatgcggattatgtcataaaaaactttgaaccgggaacttctccgctcgacaaacggatcgaagccgccgtcaaagtcgctaaagcgggctatccgctcggtttcatcgtggcgcctatttatattcatgatggctgggaggaaggctataaggagctgtttgagaaactggatgcggcgcttgatgaagacgttcggcatgacatcacatttgaactgatccagcatcgttttacaaaaccggccaaacgggtgattgagaagaactatccgaaaacaaagcttgagcttgatgaagaaaagcgcaggtacaaatggggacgctacggaatcggcaaatatatataccaaaaagacgaagaacatgccttaagggaaacactcgaatcttatatcgaaacctattttccgaaagcgaaaatcgaatattttacgtaaggcggagctgtcggcatgacggctcttttttttgctgcgacaaatgacggaaatgtttgatatttatttcaagatttattcattttcttggccgaaagaccgatataactctcaggaggggatggttatgtttaaaaaaatgcatatcaaaattgctgtgtttgtatcggcaatgcttattgtaacggttgtttttttaacggtttcttcatatttgacattaaagccgatgatgacggaggaagcaaaacgtacgacagagaatgtcaccaattcactcggtcagaacattgagcttcagctgaaaaatgatgagaccgtattaatgagattagcagacggtgaattgtcccggtcttttctatcagatgggaagaaagaaaccgcgcggctttttaacgatgagttaaaacagatcggacagaatgacaaatatgtcgcgcttgcgtacgtcggaaccgcaaacaaacaaatgtttacatatccaaaggccgattttgccaaagactatgatctgacaaatcgaacgtggtataagatggcggctgaaaaacccgataaggttgtctggactgacccttataaagatgcagtgacgggagacatgatcgtgacggcgtcaaaagccattcaaaacagcggaaccgtcgtcggagtggcgagcttagatttgaagctgtcctccattcagagcatggtcaacgagcaaaaggttccgtataaaggatttgcgtttttggcggatgaaaacggctctcttctggcccatccggcaaaacagggaaaaaatatttcggaagatcagacgttaaaagacatcactgcggacaaagaaggcatcaaagagctgcaggggaacatggtcgtctaccaaacggtaaaagaaacagggtggaaagtcggaacgcagtttgaaaaagatcagctgatgggagtagccgacaaaatgaacacggtgagcatttttatgtcactgatcgcccttgtgattacgatcggactcagctatttcctcgcaaaaacgataaccgggccgattcagcagctgatcgcaaaaacaaattcagtctcagcgggagatttaaccgtccgcgcccagacgaaatcaaaagatgaagtaggcgagttaacaaaagactttaaccaaatggttgaaaatatgaaagagatggtcgaacaggtcaaggcctcctcagaaaatgtgtctgatacatctgaccagctaaccgtcatttcacaagaaacaaatgaaacgagcggacaaatcgcaaaagcgatagaggaagtcgccgccggagcgacagagcaagcgtcagaggttgagacgatcaacgaaaaatcagaaaatctctcagtcaaaataaaaggaatcgcagatcgcgcaggcagcataaaacaactctcaaaatcttcagaggatgccagctacaaaggattggacgcgctcgggcagctgctgatgaagtcaaacgaagccaattcagaaacgaaaaaagtagaggcaatgctgaatgacctggaagaacaaacgaaaaacatagaagaagtcgtgacggcaatatccgctatttcagaccagacgaatctcttggcgctgaatgcgagcatagaagccgcaagagcgggagaaagcggacggggctttgccgtcgtcgcggaagaagtccgcaagcttgctgaacaatcagctctttcttccggccatatcagtgagacggtccgtctgattcaatctgagacaaaagaagcgtcacacgcgatgattgaggcaagcagaatgaatgatgaacaaaacagcgccattcatgaaacgggtgaggttctcaatctgattacaacggaaatgcagtctctcgttcaaggtatagatcatatttacaatgacattcaaaaaatgagtgaagaacaagcctcgattcaagaagcgattcaaagcatctccgccatttctcaagaatctgcggcagcggcggaagaagtgaatgcttctactgatgaacagctcgttacgcttgaaaaagtgaagcaatcgactgatatgttaaagagcgcaagcgaagatctgatcagcgccatttctaaattcaccttgtgacgcggtctctatcagcctataatatggtaatatagacatgaaagagtgatatatgaatcgcatcaggggaggaaagcgcagtgaacaaaacggtaggatttatcggtttgggcgtcatgggaaacagtatggcatcgcacattttagaagcgggctatcctgttttagtctacacgcgtacgaaacacaaagcggaagaggttctgaataagggagcggtctggcaggagacggtcaaagacctttcggaaaaagcagacatcattattaccatggtcggctatccgagtgatgtcgaggaaatctatctcggtgaaagcggcattctccgtcatgcaaaagaaggggcgtttgtcattgatatgacgacatcaaaaccatctctggcgaagaaaatagcggagaaagccaaagaaaagtccattcacgccctggatgcacccgtttccggcggagacatcggcgcgaggaacggaacgcttgccattatggccggaggagaaaaagaagcgtttgaagcatgcctgccgcttttctccgttatgggggaaaatattcagtatcaagggccggctggcagcggccagcatacgaaaatgtgcaatcagatcgcgattgcagcggggatggtcggagtggctgaagcgatggcttacgcggaaaaatccggtctgaacccggaacaagtgctgaaaagcattacaaccggagcggctggcagctggtcattgtcaaacctcgctccccgtatgctgaaaggcgattttgcgcccggattttacgtgaaacactttattaaagacatgggcattgcccttgaagaagcggagctcatgggagaagaaatgcccggattggcgctggccaaatcattgtacgacaagctttccgcgcaaggtgaagaaaacagcggaactcaaagcatttataagctttgggtgaaataaaaaaaagattgcccgccgggcaatctttttttatttattttccgatgaattgctgtgtccagatgtttcctgattctacataacccacaccgatttgagtgaactcaggattcatgatgttctttctgtggccttcactgttcatccaagctttaacgacggcttcaggagtcgtctgccctttggcgatattttcaccggcagttttataagtgattccgaaagacttcatcatatcgaaaggtgagccgtaagtcggactttggtgatcgaaatagtttttgtctttcatatcttgtgattttgcgtgagctgatttgcttaatttttcatcaatctgcagaggttttaagccttgcttttgtctctctgcatttgtcaattcaacgactttcttttcatacgcactgactgatgaaggagttttctcgctgctgttgtttgtattatctgtctgctttgcattgtcagccgtctggttttgatcggctttcggtttttcggcagctgtcggggccgttttttccggtgtttctttttgaacgtctttaactgtcatatcagaatgctttgcgtgtttttgcagcagctgagtcagttctttctcatttttaacgttcagctttttcacgctcgttttcatatgtagtttttcaacagcctcttgaagagtcagatgctgtacggtgtttccttttttcacagtaacgacgtgctggcatgacagctcttttgcagatgcctgctgaatgcctccgaatgtaatcaaactgactgccgcggcggcagataagagaaatgcttttttcataagtttatagcctcccagagaagttgtttttttctacatgaaaaatcttatcacagcttttttgtcataatgcaggcagccatttcctttgacaacaaacgtttgtcataattgtaattgagcacagaaaaatggctttatatcagtaaaaacgatctgtatttattttttaaaatccgttacatctcttcaaattatttgaagtgttagatatattttaagataatttgatcttgacagttttttttacccgttttcgctgtaacaacttttacaaaaatgttacaattaaaatctgtttatgtaaatatattcaatgatttgagaggtgtaacagaaagtggctgaagtcgcgcgcgaaccaaagaaaaaaacgaaacgttacagagcgctgagaatgaatctctattttttgattgtgtttcttctctttacggcactgatttttaaactcggcatcgtccagattgtcgaaggggataaacaccgccaggatgcggagaaggcaaatgcaaaaaccgcctattatccgacaccgcggggaaaaatgtatgacaagcggaacagggtggcggttgataaccaggctgtgcctgaaattgtatacgtttctacctcaaaaacctcggcaaaggacaaattgaaaacggcaaaaaatctcgccgcactgattcatattgatactgaatttatgaaggatcgaaatatcattgattactggcttgcggcacatccgaagaaggcggaaaagcttatgaaggattcagaaaacagcctgaaatcccaagaagtgtacaaacgccagattgaacgcgttccgaagcaggagattgatgcgatcaaacaagataaaaaagagctgcaaattgcggcgatttatacgcgtttttcaagcggcaacgcctatcagccgcaagtcgtcaaatcaatggacccgaataagctgaacggaaacggaaacagcggttcattgcttgacgagcatgaaaacaacaagcaaaaaccaaaaagcgatctgacatatgaagaagtttccgtcgtatccgagcacctgaaagagctccccggcattgacgtgatcaatgactggacgcgaaaatatccatacgacaaaacgctgtactctctgttcggcggtgtgacgacaccggaacagggattgttgggcgaacggaaagattactatgtcacaagaggctactcactgaatgaccgggtgggaaaaagctacatcgaatatcagtatgaggactatttaaacgcgcataaagaaaaagtagagtatgtggaaaacagcaaaggtgaggtcgtcagccaaaagcccgtcgatgaaggcagcagaggctacgatctgcaactctcgctcgatatggaattacagtcgaaagtcgaaaaagtcattgaaaaagagctgagaagaagccgcgccgcaggcaactatatggttgacagaggatttgccgtcatgatggacccgaacaacggggatattctctcaatggcggggaaacgcatcgatctcgaaacaaataaaacacaggattttgcgatcggagcatttacgacccaatatgagatgggctcttctgttaaaggagcgactgttctcgcgggttaccaaagcggcctcccgcattataaaacgtttgtcgatgcaccgcttgtatttaaaggcaaaacgagaaaacaatcgtggacacaaatgggagccattactgagctgaccgcgctgcaaagaagttcaaacgtgtatatgtttcatgtggccatgcatatcgccggcattacctacaggccgtacggcacgctgcctgccggattagacgatattaaaaaaatgcgcaactactacgcccaattcggtttgggtgtgaagaccgggattgatcttccgcaggaatcagcgggcatgcagtcaaatccgcaaatggtcgggggattgctgcttgactttgcgatcggacagtttgatacgtatacgccgcttcaaatggctcaatatatttcagccatcgcaaacggcgggtatcgcgtccagccgcggatcgtcacaagcattcatgaaccggacagcaaaaataagattggaaaagcgattgaacagcgggatattaaaattttgaacaaagtaaataacagtccgagcgattttgaccaagttcataaaggaatgaaattggtcacaagctcacctcaaggaacggcttattcaacattccaaggttccggcgctgatgtttccggaaaaacgggaaccgcggagacgcactattacggcacgaacaaaaactggtgggggaagtacacgtataacctgacctttgtcggctattatccgtcagagcatccaagagtggcattcagcgtcgtcgttccgtctgttggaaatgataaagatcatgtaagcaaaaacattgctaagggagcaattgacgcttacaaagaacttgaaaagaaatacaataaaaaataacaaatgaaagggcggccgaacatctcgtgcgccctttctttcattcaggaaaattgacgttcacaataagaatagaaggagaatgctcattttttagcgaatcaatctagtggaatttctttttatatcagtccgtgtccagcctgcagtgcgagtataatgcaaaggagggattctgtggaacaggatactcagcatgtcaaacagtttcaatcgaaaaccgatcttcatgccgttttgacgtctaacgggcgtattatgtatatttccgcaaactgtaaatcgtacttcagttattctcaggaagagatgatcgggtcatttctcaaaacgttcctgcatgaagaagatcaatttttggttgaaagttacttctataatgagcatcatttgatgccttgcacctttcgtcttattaaaaaagatcataccatcgtatggcttgaagcgggtgtggaaattgtcacaccgcaaatggaggggacggatcgggaaatcatcctcaaaatcaaggtgcttgaggagaagacgccccgccggccttatatgtatgaacaaaagaagcaaaaggcagaacaacagtcggaagatgcggctggaaacggcgaattcgagcgtcttgttgaaatgctgccgaatcctttatatgtcagcatcaacggcacaatcgcctacgccaacaacgcgatgcttgccatgctgggagccgaaagcaaagacgaggtaatcggcaggcgctcctatgagtttattgaagaagagtatcacgacattgtgaaaaaccgaattgtgcggatgcaaaaaggaatggaagtcggaatgatcgaacagacgtggagaaggctcgacggcacgcccgttcatttagaagtgaaggcggcaccgacgacatataaaaatcagcgggcggaattgctgcttctgattgatatttcttcacggaaaaaattccaaacgattctgcaaaaaagcagagagcgttatcagctcctcattcagaattcaattgacacgatcgccgtgattcacaatgataagtgggtattcatgaatgaatcgggcatttcgctgtttgaggctgaaacatatgaagatttaatcgggaaaaacgtctatgatcagcttcatccctgtgatcatgacggcgtgaaacagcggatccaaaatattatcaaccgaaagaccgagtcagaaatcattaagcaatcgtggtttacctttaaaaaccggctgatctacacggaaatggtctgcattccgacgacgtttttcggagaaacggccgtgcaggtcattctgcgtgacatttctgagcggaagcagacggaggaattaatgctgaagtcggaaaagctgtctatcgcagggcagctggcggcggggatcgctcacgaaatccgcaatccgctgacggcgatcaaaggatttttacagctcatgaagccgacgatggaggaaaacgaacattactttgaaattgtgttttccgaactgagcagaatcgaattaattttaagtgagcttttaatgcttgccaaacctcagcaaaacgccgtgaaagagcgtgtaaacttaaagaaaattataagtgaagtgaccgctcttttagagacgcaggcgaatcttaaagggatttttatcaaaacggattacgaacatgacagcatgtatattaacggtgatcaaaatcagctgaaacaggtgtttatcaatctgattaaaaatgccgttgagtcgatgccggatgggggaacggttcacatcatcatgacagaagatgagtattccgttaatgtgacggtgaaagacgagggcgacgggataccggaaaacgtgctgaaacgaataggcgaaccgtttttgacaacgaaagaaaaaggaaccggcctggggctgatggtcacattcaaccttattaaaaaccaccagggagccatccaagtagacagcaaaccggacagaggcacggcctttcacattacattcccgaaacaataaaaaaaacaacggcgttatgccgttgtttaaatagtctgcatggattctctcgtttttaaaataaatgcttccagccggtccaagccttctctcaatgtatccagtgaatatgcgaatgacagcctcacatacccttcacccaactttgaaaacgagctgccgggcacaagagccacacctgcatcctctaaaagagccatactaaaatcaaacgatgacattccgaatgacttaatggaagggaagatataaaatgcgcctgacggctttacgacgtcaagccccattgaaacaagacggtcatatacatagtcaagccgctttttatactgttctctcataataagcgcatcatcaacaccgtttgtcaccgcttcaagagccgctttctgagagattgaagacgcgcatgtcacactgtattggtgaacttttaagatgtgcttggcaatttctttcggtgcgaaaatgaaaccgattctccagcccgtcatgctgtgtgattttgacaggccgttgatgacgatcgtctggtctctcaaataagacgcgatcgaataatgcggtctgtcataggttaattcgctgtaaatctcatcagacaggacaaaaacatttctgcccttcaggacggctgcgatgttttgcagctcttcctcagacaatgtcacaccggtcggatttgacggataaggaagaatgacgcattttgtttttggtgtcagcgattcttcaataagccgcgccgtcagcttaaatccgtgtgtcgtcgtatccacatgaaccggaacggcgcccgacatgcggatgatcggttcgtagcccggatatatcggtccggggagaataacttcatcgcctggagataaaatcgtccgcaaagacgcgtcaatcgcttggctcgctccggttgtgacaatgatttcagtttcagcctcataattcaaatcagcttttttcttcatataaagctgtacggcctgtctcagctcaaggccgcccgcgttcggagtatatgccgttgcgttctcgtcgattgcctttttggcagccgctttgacatggtgcggcgtgaagaaatccggctggccgatcgtaagcgaaatgacattatcgtgctgagctacaagatttgagaatttgcgaattcctgaaatttcaatttcttttacattcggattaagcaaatgttccataattcatcaccttatactatatattgagtttatcctattttaccactagctgagcatttgtcatctttttattgaactatcccgagtatatgtccgatatgtgaaaacataccttttttcagaaaaaaataagacaaccagctgaaatgattgtcttcattgtatcatgatctatctattgtgatatgtggcgaatgtcattaatacccgtattcaaagctgacgtcttcccgccataagatgtatggagcgggcttgtcgggacgctctttcgcctcttttttcatttgcaggtaagccgttttgctgatatcttctaacaccgtcatttgatcttggtcgaatatgactactgtacccatttattacacccttcttcctgaaaaatccttgactattttaccactcgatgtcaaaaagtcaatgggatatcagaaaaaagcatctttttataaagagttcatggccagttggcccgaatacattcactttttccgtttacagccgatatatacagtacaatactgaatgcggatagcgagggattgaattgtctttacaacaatacgatattttattggattcaggcacaaacgaattagaaatcgtcaaatttgaagtaggcgtcaatacatttggcataaatgtgatgaaagtccgggaaatcattcagccggtagatgtcacatctgtgcctcagtctcataaagacgtagaagggatgattaagctgagaggcgaaattcttcccgtcatcagtctgtattcctttttcggcgttgatgccgaaggagcaaaagacgataaatatatcgtaacggaattcaacaagcggaaaatcgtctttcacgtcggttccgtttcacaaatccacagggtgtcctgggaggcgattgaaaagccgacttccctgaaccagggcatggagcggcatttaacgggaatcatcaaactggaagacacgatgatctttctgcctgattatgaaaagatcatttacgatattgaatcggcatccggagttgagacttatcatgtccatcaggaaggatttgatgaaagacgggcgggtaaaaaactgatcatcgttgaagattcgccgcttctgatgcgtcttttgacggatgagctgactgaggcggggtacagtgaaatcgttacatttgaaaacggaaaagaagcgtatgattacgtcgtggaactgacggataacggagcaaacctgtcagatcatattgacatgattatcagtgacattgagatgccgaaaatggacgggcatcgtttgacgaagctccttaaggataacccgcaaagctctgatgtgccgattatgattttctcgtccctcattacggacgacctgcgccaccggggcgaagtagtcggagcggatgaacagatcagcaagcctgaaatcagcgagctcattaaaaaagtggatacgtacgtgattgaatagaaaaaagccgatgcatgacgcatcggcttttttgcggcggaattaaaaataactctcaccaagttttttaaatacgggtttatgataagcgggctgctgcctgttggcggcaagcggtttttcctttaagcccacatatttttgcaatacgtttttcgcttttgtcaaagacatttgtgctttaggattgcggtacgattgatttaacgtacctaaatgcggaagatgctggaagtcttcttttgttggaggcatgtgaaaatagtagtctccgatagagataagtacgtctgactgctgttggctaaacctgggattatttgaaaagtgaagccctatttttttccctttgccttctttcacaagcttttgtaatgcccgttttttcagcagataaaggtatttagggttgggggcggtttttgcatggcggttcacagtataaacagcttttgaaagattctcgatggttggctgcagctctttcgaataagcgtggtcgtccattatttctctcctttgcattgatcaagttcatatatagattatacttttttagcgttgaaatgcaaatattgattataaaaatacgcctttttctgatgaaaagggcgcatttttttcctttattagacaggtttcgcatgtttttcggaatcagcctttaatgattgctgcacatcgacctctgctgcctcggcgctgtatttcggaagagcgataaaatagaacacaaataccgctaaaatcacgattcccatgccgtaataaaggtaatcaatattggaaacgaatttcggaaataacagggcaaccagtccgagtgtaatcgattgggcaaacatcataaaaggatcctgccagccgctgacccggcccattattttcggatgaacgattttcggcatccagccgccgatggcgatattgacagggccgatgcacatgccgaggatgaaagccgccgcataataaatccacagcttatccgtatagccgaggacaaaaatgagcagtccggctgccaaaataggaatcgacatcaaatgatgcggtttgactttttttgcgatcattgttccgatcacacttcctgcaagcaggccgaagccgagtgcgacggtgaagatggaagtatgtgattcgtaatgatcaggcgcaagtccgtatttcatcgtaaacatcggcagtacggcaaagccgccgttgacaaaaccaaagataaaaaagccgaaaataagggaagcaagcaatttgtttttaacaatatatacgatcccttccttaaaatcagcgaccgagtctttcagaaacgaatctccccatttaaaagggccgttcggctgacgggcttctttcggaatgcggcaggcgcggatcagaaagcctgatacaataaagctgacaaaatcaaggataatggctccgtgaataccgatcgttttatacataaacgcgcccataccgacgccgaataccataaagatgctgaacaggatctggttaagtcccgccgctttcgcataatgctccttaggcagaatagcttgtacaaggctggcttccgccgggaaaaagaacttggtcacggcgcttctgatgaacaaaatacagaacacgagagggatgctcccggtgtataatgcggcaaataatacgatcgtcagtccggctctgatccaatcacaattctctgcgacctttttcctgtcaagccggtcagctgcgacaccgacaatcagaaatacgaaaactgtcggcagtgaatacatcagctcagccaaagttgtgtatgccggctggtttgaaaaatggtccagcaagtaaaaagcgaaagccatattacctacagtcgttcccatttgagaagcgagtgctgcgaaaaagagacggacaaaattgcgatttttaaatatatccataaacacgctccttaccctaaaggtcccactgtaatatattatcatcagctcgttccattaacaaataagatctttctatcttataatggtcacccttgttccattaggaacggtagcggcaagttcagtgacgtcctgattatacatccggatgcatccttttgataccgctttgccgatggaggaagggttatttgttccgtgaatgccgtaatgaattttagagaggctgagccaataagcgccgaacgggccgccgggcttgggctggcggttcacaatgtaaaattctccggtcggcgtggtcgtcaatatttttccgactgcgatggggtacgtacggatgagcctgccgaggcggtataactccagtttcttcgctccgatatacacgacaatggaatagggaatggtggatgggtcgggaagattcggtatgataatgtgctgtcccgcgtatatgaccgattggattgagggatttgcctgaaggagagcagcagtgcttattctgaagtcttgcgcaatgcttgagatggtttctccttgtttcacttgatatgtcagcagtttcgtcaccctcctttttgctcttttccatatacatattacggaggggatgtctgtgcatcgggataaaagtcttatttttgtacggttttcaatgtgaacagcgtgatttccggtctggctaaaaatcgatacggcagtcttgtcgtaccgagcccgcgattgacgtaaacggctgtgtcatgcagcgtatacatgccgtcggtatacgtttttccgtatggaggcgtaatgagagggccgaaaaacgggagctggacctggccgccgtgagtgtgtcccgacagctggaggtttacgggatatccgccgatcttgagagcggcatcaggctcgtggacgattaaaatggaaaacgcatcttcggaaaggcgggaaagggtgccttcataatcgggttttccgagcattacatcatccaaaaacgcgagttcaatccggcttccgtctgtcagctgcacctgacggcagccatttcgaagcacttgaaaatcagccgcttccatcagagccttgtacgtgttcgtaccgtagcctccgtggtcatggtttccgtaaacacaaagtttgccgaagggagcttccagattttgcagcacggccagtgcttgctggtgatcattaaataaatgcggcttatcaattaaatctcccgtaaagatgagcagatcgggtttcagctgattgatcttttccgctgctttattcaagtcaccggatgtaaacacatcactgagatgcgtatcgctgaattgaacgattttaaaattgtcaaagccgcgggggatcaggcggctggtgattgtatgacgggtgatctcaatcatgcgcggttcaatataccgggcatagccgtaacctccgcaagccgttgcgagagttgcacccaaaatgccgaatcctctttttaaaaatgttcttctcgtcattttctccatatgtaaaaccaacctttgtcagagttgttctattatatcatcagcctggctgaaaaatcccttctcagcatgtaatgacgcggaaagacatctatgataaaattatgaatgattattcattcaataaaaggggtgggtttgttatggataagaaagcggtaatcattacaggcggttcaagcggcatgggaaaagcaatggcgaaaaaacaggctgaattaggatggcacgtcatggtgacagggaggaaccatgaagcacttgaggaaacaaaaaaagaaattgagacctttgaggggcaggtcgcctgttttcaaatggatgtccgttctgattccgccgcttcagacatgattacagaagcgaaaaaagtctttggccggctcgatgcgctgattaacaatgcggccggcaattttatttgcccggcagagaagctgacgcccaatggatggaaagctgttattgagattgttttaaacggcacatttttctgcagccaagccgcggcaaggcattggatcgagcaggagcagaagggcgtcatcttaaatatggccgctacatacgcatggggagcgggagcgggtgtcgttcattccgctgcagccaaagcgggggtattgtcactgacaagaacgctggccgttgaatgggggagcaaatacggcatccgcacaaacgcgatagcccccggcccgattgaacggacaggcggtgcggagaagctgtttgaatcggaaaaagcggtgtcccgcactatgaacagtgtgccgctcggccgtctggggacaccggaggaaatcgccgctttggcagcgtttttgctatccgatgaagcatcctatataaacggggattgtatcacaatggacgggggcaatggctgaatccttacccgttttaatttacatgacatattttgcaaaacaagcgaacgttaaaggtgaccgttcgcttgttttatttttctattcaaaattatgatataatttttaaagattaagaggtgaataagtgaagaaattattaaaatggttcgttgtactatttgtaagcagtttcgttatcatctttaatatttggtactttatcatttgcgcttttactccggagtattatcaaaataccaatcttacatctgatgaaataatcagatttgaaaagctatatcatatagattttcctgatgaaacgaaatttattaaagccagggagtatttgagtgggctcggaggcgatacatcggctgtatgatatgtgtctctgccaaccaagctggcggaaacaattttatctgattatacgtatatgccaataaatcatactgatcatgccggttcaatgtatgaagttgacgtttccaagagtgctggcgggttaacaactcttacatttggcactttagataaaaaaggaactttctttcagttgaaacatgatgatgattggatatttaacagtactgattggagccattatttttggacagccgccggttatcatgctcttatatttatccttttatttgtgatggtgaaacaaatgaataacgtccttaattaaccggtctgaagagtgatcttaaaaagttttccccttttattttaaactgctgccatactgcctcctttttcccctaatctaaacatttgtggtgctgatataattgtgtataatcagacaaagatagagaagcaggtgataacatgttggacccacttgatatactgacgaatattgatgatgttattccgtattaccaagcgatttttaacgctgaggaacaaagagtcgtaggctacgaagtgcttggccgtattttggcagatgcggagattgagagcctcgggccgtttttcttagattccggcatcccggaagaatataagcttgaggtcgatgacagagtcatcaggcaggcgctggagcggtttaaagaagctgatcgcgatctgttgatttttatcaatcaggatgcgaatgtattgatgcttgaccacggcgagagctttcttgagcttttgaaagaatacgaagagcagggcattgaattgaaccgtattgtgcttgagatcaccgagcacaatttcgaaggcgacattgaacagctgtaccatatgcttgcctactatcgtacatacggcattaaaatcgcggtggacaatataggtaaggagagcagcaacctggacagaatcgcgctcctttcaccggaccttctgaaaatagatttgcaggcgctgaaagtatctcagccgtcaccttcgtatgagcatgtgctgtacagcatttcattgctggcgagaaaaatcggcgccgcgctgctgtatgaagatatagaagctgattttcagctccagtacgcatggagaaacggaggccgattttttcaaggttattatctgcaggcgccgagcggcgattttatagaccggagcctgttaaaagcacgcttgaaaacggagtttcagcaatttatcacgagagaaaaaaagaagctggagacagtatacgaacactctgagaatttttataagcgggtcaatcaggcagtttccgaactgaagaaaacccatcaggcggacgatgagtttattaaaaaactggcggaaaacctgaccgactgctgtttcagaatttatatgtgtgatgaagaaggctatcagctgacgggaaatgtgttcaagcagtccggcgaatggctttatcagcctgaatacgtggagaaaaactggagctggcgtccgtactttttagaaaacattatgaagatgcggaattcaagaaaaggctttttcagtgacctgtacagtgatattgagacgggtgagatgatcagaaccttttcatacccgatggatgacaatatgtatttatttatcgatctgccttactcttatttatatgaacaggacgggttactttaaagcggctgcagtatgccgcttttttttataaatgtgaaaaagttttaaaaaacgattgacaatgatagtgataatcattatcatttagttatagagagaagttactctctgttccccaacccctctatcagatcaagatccgaaaaagcttggcgctacccccgccaagtttttttatgctgtctgcgcataaaagggcttctccttacatacatctgacaatggcggctcaaaaagcgaaaaattatttttgaaaggtgtatgacattccgaaaaaagcttcaaactattcgaaaacacggttttcccgtttatttctttttgaaaatccagcgggaaaatgccatcccggtctactttatggtatgatgctctgtaggacttgtattataataaatacttgttgatttgaagttgttttttgaaaggagtctttttttagaatgtcacaattaatgggtatcatcacgcggctgcaaagtctgcaagaaacagcggaagcggctaacgagccgatgcagcgttattttgaagttaacggcgaaaaaatttgcagtgttaaatatttcgaaaaaaatcaaacgtttgaactgacggttttccaaaaaggtgaaaaacctaacacatatccgtttgataacattgacatgatttctattgaaatttttgagctccttcagtaatgtgatttgatttttcaggctgaccaagcttccggtcttccgcaagcggagctttattaaattatgcaaaggaacgtgcttgttcgtttggttgtagactctggaaagaggagtgtccgtacatggctgattcttttctgttttataatctttctgaggcacagatgacctttcaagacgtgacggagcggctgaaacgctttgtcaataaagacccccgttcagcatacgtgctgtctgtagggactgattcacaagtttaccgcgacttcacaaagtttattacggctatacacttgcaccgtacaggcaagggagcttggggctgtttgaaaaatcacgaccttgcaagaccgatacatagccttcgcgaaaaaatctcgctggaaaccgcgttcagccaggagatggctgcgcatatcctcgacggctgtcttatggaactgacagatttgctcttgccttttgcggatgaaggggcggatctttcatttgaagtgcatctggatatcggtcaaaaagggctgacaaaagaattgatacaagaaatgaccggccgcattacctcgatgggtattgaagcgaaaatcaagcccgattcctgcacagcattcagttatgccaatcgttacacaaaataatatttcatacagaatccgcaaaatgtcgaattatgcggttgacgatttttttctgtttacttattctagcggtagagctgaaagcaaatttcacattgctttcagaggtattcagttaaaaatagggggcctgattacgtatgagtcttatcagtgaacgatttacggaagaagaacagaaacttctgctgaatatcctgatcaatcaagaatatgccattgagcttttgaccagcgaaatcaacgatatagaagcagggtcaaaaagcgttgatgggaccacttataaaaaactcgtaacgctctatgaccgttttcggaacgaaaattaatcagcggcctataaattgatactcgattgcaaagagtatcttttttattgacggaaacttttcgacaaaaaatgataatgtttatattattgcaatatagggaatacatgctttgatgaaaaatgtaaaggggtcgaagtgacatgattagcttacaatcagatcagcttcttgatgcaacagtcggacaatttatgatcgaggcggataaagtggcgcacgttcaagtcggaaacaaccttgagcatgctctattagtgctgacgaaaaccggctataccgccattcccgtccttgacgcttcgtaccgtctgcacggtttgatcgggacaaatatgattatgaacagcattttcggacttgaacggatcgagtttgagaagctggatcaaattacggttgaggaagtcatgctgaaagacattccccgtctccacatcaatgatccgattatcaaagggttcagcatggtcattaacaacggctttgtctgcgttgaaaatgatgaaggcgtctttgaaggcattttcacgagaagagtcgtattaaagcagttgagcagtcatatcagatcattgaataagtaggctcgcacgatcagcctatttgttctttcgcatgccagaaaaagaaaacgcatacatacgagtggcgcttgcctcggcagcctttatttgattagaatggtagataaggaatacgaaaaggcattgaaaaggaggacgacatgcagcttcaagagcttcatatgctcgtagttttagctgaggaattaaacatgaggaaggctgccgaacggttattcgtgtcacagccggctctgtcccagcgattgcagaccattgaaaaaacctggggaacaaagatctttcttaggtctcaaaaaggacttacggtaacgccggcaggagaaaaaatcatacaatttgcaaatgacgtcacggatcggcaagaaagaatcagagaaaacattgatgaacttgagggtgagattcacggcacattaaagcttgccgtcgcctccattatcgggcagcactggcttccgaaagtgttaaaaacatatgtggaacgatatccgaatgcaaaggtctctctcattacaggctggagcagcgaaatgctgaaaagtctgtatgaagatcaggtacatatcggcattatccggggaaatccggaatggaaaggccggaaagattatttaatgaccgatcatttatatttggtcgatacggaaatttcctgtattgatgatattgcccataccgaccggccgtttattcaattcaaaagtgacagtacatattttcaggaaattcagcattggtggcatcaaaaattcaaaacctcgccgaaacagaccatccttgtcgatcagattgaaacgtgcaagcaaatggcgctgcacgggatcggttatgccattctgccgtcagtcaccttagaagaggaagataaagtaaataaaatgcccctgcttgatacaaaggaccatccgatcggccgtgacacatggctgctcggttatgagccggcatttgaattaaaacaggtgcaggcttttgtttctgtcattaaagatatgctgaaacaggaacgcccattttagaaagacagcaatcatgctgtcttttttttattttttattgacaatgaaaatcattatcatttaaagtgttatgtatgttaatgaaaatcattatcaattacgaggtgatcatatgcagaaagcattaatgatatacgcaagcatgtcggggaatacagaggatattgccggcattataaaagaaacactgagcgggcatcagatagcggttgactgtcttgatatggacgaagcagatgcggattctctcaaagcatatgattatgtttttgtcggcacatacacatgggggatggtgatcttccttacgaagcggaagatttttacgaagatattctgcacagccagctcaacggactgaaaacggcctgtttcggttcaggcgatcacgcctacccgaagttttgcgaagcggtcacgctgttttgcgatgcgtttgaacaggccggagccaatttatatccggaaacgctgaaaattgagctggcgcccgagacggctgaagatcaagaatgctgcaaagaatttgtccgcggttttcttgcatgggccgctcaccacggagaccggtgccatgtttcataaaggcgcgacggctgtcatggcatcagtatcttcaggattttttgtcgctgtgaaaggcgaaggtatttttcatttttcggcggaagaaggctggaaaagactattccgagtgaagagcaggattcatgtgctgacttatatagggccctacatattcgcggctggagaaaaaggcgccgtcctcagatcggccgatcaaggaaagacttggacggcctcccgatttccgaccagcgcctccgtatgggccgttgccgggcggaatgacggatttgtctgtgcgcacggcacatactgcatctacttatctgatgatttcggcgtcacttggcatgtggctaagcctttttcacaattaaaggagccgcctgtcatccgttcgctttgtttacacggtcagacggtttatatcggcacccggattcatatgaatcatggcggcatttgggcgtatgatctgacgacggaaggccgcatccggcgtataagccgcgaaaggcagcgcatgacggcttcaatgatgatgtatcagaatgactggctcattgcagcaaagggcgcggcaaagggagaacggggggagcttgctgtccgaaacgtgcggacgcatgaggagtttgccattacagccggggacaatgtacgggaaaaatcatttcttgacgtgtctgaggataacgggattatttatgtcacttcgtcacaggacgaaagcggattttcgcgtatttatcaagctgatctcgctgccggtgaattaaagtggtttgatacgatccgcggtcacggatggcgggtggccaaccgggaagaagattttttttgcgcgggcctttacgaaagtaagtttgtcagaccgtatgaggcggttcggctcgcacattagtttttatgcataaaggagagacgaagatggggaatgtattgcttgtttacgctacaatgtcaggaaacaccgaggcgatggcggatttaattgaaaaagggctgatcgaagcacaagcatccgtagacagatatgaagcgatggatattcatgccggactttttaatgattacgagtatattttattaggcacatatacgtggggagacggggatcttcctgatgaaatgctcgatattgctgaagatatggaaaaactggagtttacgggaaaaacatttgctttgttcggttccggagatacgtcctatgagtttttttgcggagcggttgacgaattggaaaaagtaatcacggcccgcggcggacgggtggtgctgccgccggtcaaaattgaaaacaaccctgagggcagtgaggaagaagagctccgggaattcggaagacagtttgccgcgctgtgcagccagccggcagaataaaggcttgttcctttttttcttgtctttgtatccttcctttgttacagtaatgaggtagaaaatcagaggaggacaatacatatgaaaatgatggatgcaaatgaaattatttcatttattcaaaatagtacaaaatcaacgcctgtaaaagtgtatgtaaaaggcgatctcgaaggaatcagctttggcgattccgctaaaacattcctgaatggccaatccggcgtcgtttttggcgagtgggctgaaattaaaagcgcaatcgaagaaaacaaagacaaaattgaggattacgtcattgagaatgaccgccgcaactctgcgatcccgatgcttgatttaaaagatgtgaaagcgagaatcgagccaggcgctattatccgcgaccaagtcgagatcggcgacaatgccgttatcatgatgggtgcatctattaatatcggttcagtcatcggcgaaggtacgatgattgatatgaacgttgttctcggaggacgcgccactgtcggcaaaaactgccacatcggagcgggttctgtattagcgggcgttattgagccgcctagcgctaagcctgttgtcgtagaagacgacgttgtgatcggcgcaaatgcggttgtgcttgaaggcgtaacaatcggtaaaggcgcggttgtcgccgccggagccattgttgtaaatgacgtcgagccatataccgttgtagcgggaacaccagcgaaaaaaatcaaagatatcgatgaaaaaacaaaaggcaaaacagaaatcaaacaggaattacgccagctgtaaggaatggtttgatagaatgggcgtggatgataaaatccacgccttattcttatctcaaggaggaatacatatggaaaaagagcggctcattgccatccgaagagatctgcaccgcattccggagatcggctttcaggaatataaaacccagcagtacctgctgaatcttttaaaccaatatccggaagaaagaattgaaatcgaaacttggagaaccggcatctttgtcaaaatcaagggcacggctccggaaaaaatgctcgcctacagagcggatatagacgctctgtcgattgaagagcagacggggcttccgtttgcatctgagcaccccggttttatgcacgcatgcggacacgatatgcacatgaccatcgcgctcggcattattgatcattttgtccatcaccccgtcaaacatgatctgctctttttattccagccggctgaagaaggaccgggcggagcggcaccgatgcttgaaagcgatgtgctgaaaaaatggacgccggatttaatcaccgccctacatatagcaccagagctgccggtcggcaccatttccaccaaaagcggattgctgtttgccaatacgagcgagctcgtcatcgatcttgaggggaaaggcggacatgcggcatatccgcatacagcagatgacatggtcgttgccgcgagcacgcttgtcacgcagctgcaaacggtcatatccagaaatacggatccgcttgacagcgctgtgataactgtcggaacgattaccgggggcacggcgcaaaatatcatcgcagagcatgctcatctggagggaaccatccggacgctttccgaggaatcaatgcgtatggtgaaaaagcggattgaagagcttgtcaaaggaattgaaatcggcttccgatgcaaaggaaaagtcacgtatccgtccgtttatcatcaagtttataatacaagcggcctgaccgaagaatttatgcaatttgtcagcgatcatcagcttgctgacgtgaaaacggcgaaagaagcgatgaccggagaagatttcggatatatgctgaaaaaatatcccggctttatgttctggctgggggccgattcatcccacgggcttcatcacgccaagctgaacccggatgaagatgcgatggaaaccgcggtaaatgtcatggtcggatatttttcgaagtatgccaattaaatccgaaaagaagaataatctaacaaaaattgagcattctacataacggaggtgttcaatatgacgaaaaaaattggaattgaacaatctttatcggatgtagaacaggcgttaaaacaaaaaggatatgacgtagtgatgatgaagactcctgaggatgcgaagaattgtgactgctgtgtcgtaaccggacttgacagcaatgtccaaggcattgccgatacgtcaactcaggctcccgtcattacggcttccggaatgaccgccgacgaaatctgcagcgaagtggaaaaaaaatttcattaaaaagaaaaaaccgaagcttacgcttcggtttttctattcggcggaagcggcgtttttaaaacggtcgagcgcgattttcatttctctccgcagtacgcgttcaacccgccattgctccatattttctgttttggcaatgattctgatcaccatttctgacgtgcttaaatcctgaaccccgatgacgtccggcccttccttaatctgcgggagctcagcggctgctttgtcacacgcggtttgcaggatttgaatggtttcatcaagatttttttcaagcggcactttaatatcgacaagcgcctgcatcgttccgcgggaatggttgctcacattcgtaatgccccggttggggagatagtgaagcgtgccgtcaaagctacggatttgcgtcgtacggagaccgacctgctcgacaatgccgctgtagccggcaaccgtaatataatcaccgacgtcgatctgtttttccaaaaggataaaaaatccggtgacgatgtcactgacaagcccctgagccccgaagccgacggcgagaccgaccacgccggcgccggcaatgagagcgctcggattgtagtgaaataaatccaaaatcattacgataaaaacgaaaatcaggatgtatccatacacattaagcgcgaggcttcgcaaagtataagcgcggcctgtggagaggttgttttgttgctcgaatttctgaaacagatgcttgatcagcttttttcctgccgtccggaaaataaaatacgctaaaataatgagagccagctttatgatgaaaatcccggcagatgtgagaagcccggcccaatcaaagtgttttaaatcaatcatagtgatgtcttcctttcaagtctattgaggaaaaagctaaaagtgatatacccgttttttaaataagataaaccttttcatagaaaccagttattacatttatgatttgttcatattgcccggtttcaatatcttcatttttgtgaagatatgaactaaggaatcgccacactcattttaacatggtgattcagccaaatcatttcctttggagggaaaacaggagaacgttgccaggcggactgaaagccccggcaaaaaacttttttcataaggagggaaataagatgaaattacatcagcaaatgcctgaattaacaggcgctaaagcatggattaacagagaagttacgaaggaacagctggtcggcggaaagccggcactgattcacttctggtccgccagctgccgcatgtgtaaagaagcgatgcctgaggtgaacgggtttcgtgataaatataaagatcagctgaatgtggtggccgtccacatgccccgttccgaagacgatcttgatcttgagaaaatcaagaaaacagcggctgaacacgatatctctcagccgatttacgttgacagcgatcatacgctggctgacgcatttgaaaatgaatatgtgccggcttattacgtttttgataaaagcggacagctccgccattttcaagcgggagagagcgggatgaaaatgcttgaaaaacgcatcagccgggtactttcagaaacggagcaggcttctgagtaatcgggacaatctccgccggactattgtctcggttctgcaaaccctttgccgttaggtaacagggtttttttgtggctattggataaaaaattccaatatggcatgtatggcttaaaaaataagagaaacagccgtaaacacgctgtaccgcttgttttatccatatcattaacttttacatattatagtcgaaaattgtagatatcacgctaattttcattaaacaagtaatttcaagttatattttgaaatggttcaataaattggaactttgtccagaatcccctatatgataagggatttttgtatataaagtaccattttcagaaaataagcaatttttcatagagtaaataaaatagtaaaatgataaaataatagttgataaaattacttttgtaatctaatatcttaataaaagcgtttaaatttttgacagggggttttacacatgtttaatgaaagagaagcgctgcgcttacgtttagaacaattgaacgaagcagaggtaaaagtcattcgtgaatatcaaatagaacgtgataaaatatatgcaaaactgagagaattagacaatacgggcagcctgtccgatacaaaaaaagagtttcgtccggagaaaaaaagtgactctctcccggtgcttgcagagcttgcagcacaggaaatgagaagctatcaaaagccgcagacacagccgcaatcctcccagccgcagatgcagtctattacgtctcttcccgccggcattccagacggttctacaagaagaagaagagggacggcgagaccgggatcaaaagcggcaaaactgcgcgaagcagcgattaaaacattgaaacgccacaatgcagcgatcaaaagttccgaactgcaaaaggaaattgaaaaggaaagcggccttgaaattcctaatatgacaacatttatgcaaagcttaattaaaatgtatccggaagtgaaaaaaccatatcgcggccaatatattcttgagggagaaatttctcaggaaacagcagaaacggcaaatgatacggctgctgaataaaacagtaaaaactgcttgcgttactcaagcagtttttttgcgttttcccgtttattctgcggaagtgacgcatcttttccaggctttttttcaagcttgacaacatatttttggaaaggcttttcgccgtcagctcgttctttcaacgcatccagtttttcatcaaacgactgatcgcgggactctgattctacaaattgtttttgaagggagatgacttgttcggtaacggctgtaagcaagtcttctgcctgaacagtctctttggaaacggaagggatttccagagtttgttccgccggttccgccgtgcggctgtcaatatcagcaaaatggccggcaatccaagcatcgctttcgtcaagctgccgtttatatgaaagaatggtttcttgaaataacttttctttcgttttttctatttctacaagccgttcttttgtttctagtattcgatctctcatatgattaatttctattttaatatgtttgagctggtattctttttctatcatttgtgtttggagccgggtattttcgtctgcagcggcatgataacgctgtttcatatcttcgtgagaagtccgttcggtttgaacggcggtctcaagtgagcggatgcgggtatgtaagtttttattttcttcttcaaattttacatttgtaagatgcagccgatgtttttcttccatctcatttttccgccgaaacgtttcctgctgaagcagttcttgcagaatgacgattttatcgagcagcccggccctgatttcatgcaaagaacgttccgtgtcactagtctgtttgtgtttttgcgccatggcttccaattcgtcagaaagcttgtgaagccgctctttaatattggcgttttcctcctgaagcttattgtttttttgatggaagtagcttgcttcaaattccgaaattatttttctgcatctggaaagttcggatttcaagtaaaggttctcttgagaagtgtcgtggaaaaacggacctgatattttcataagaaccatctccctcttgatgttaacactacaatatgggaaaggaacaacggctattcctcttaattaaacagacaagcaccgtaatattgtatttcggctgaggcgtttgctatgcttttatatagaatgggagagcgatgacatgaaacgggtgaatgtaatattagcgggggagcttcccgaagattcggagaaccgaaagcttttgcaaagtggaagggcggcatgttttatgaacaggcgaaaaaagccttcggcggcggagaaacggtaattatcagccgccctgagcatataaaaaagttcttatcaaacagggagcggcatgtttttgccgatgagccgcggtttcggggaatgggcccgcttgccggcatatatacggcaatgaaacaaacggaaggcgaaacatatacggtcatatcctgtgacacgccgctcgtgacaagaaaaacgatggctgcgcttgaaatgaagctgacgggaaatctggacgctgtcataccggtttgtgaaaacagagagcagcccctcttggcggtttaccataaacgggtgcaggatgtgctttttgatcagctgacacaaaacaaactgaaaatgacagacacgctgaaacggctgtctgtctgttatgtgcaggctgaagacatcggcgccgggccggaggagttcgctaatatcaacacacgggacgattacaccagacttttggcgcatgtcgagtcttcaaatcaggactgatcggtaagaaacatggtatgatggaaataaaaatgcaaggggacaacacagatggaagagcgctattcacggcagacaagatttaagccgataggggaaaaagggcagcaggcgctggctgacagcagtgtcctgattgtcggagccggagccctcggaacagccgcggcagagggccttgcaagagccggagcgggccgtatggcgattattgaccgggattatgtggaatggagcaatttacaaagacagcagctgtatacagaagaagacgcgagacagcgcctgccgaaagcaatggcggccaaggcgcgtcttttagcggtaaacagtaatatacatatcgatgcttacgcggcggaaggtacggcggaaacgctcgaaccgctgatcgaacaagcggattgcattgtggatgcgacagataattttgaaacgagaatggtcatcaatgatctggcgctgaaaacgaaaacaccttggatttacggtgcctgtgtcagcagtcagggaatgtgcatgacgattattccgggggttacgccgtgtttatcctgcctgtttgagcaaatgcccgtgggcggagcgacatgtgatacagcaggcatcatacctccggcggttcatatcgtctccgcctatcagcaggctgaggcgctgaaattgctgacaggaaatcatgcggcggtaaatcggcgctttttcacgtttgacgtgtggaataacaccaatatgagcataaatgtggatcagatcaaacgggatcattgcccttcctgcggcgcggagcccgtatatccgtatctgcagcctgaaaacaggccgaaagcaagcgtgctgtgcggaagagacaccgttcaaatcagatcggaagccttaaagaggctggataaagaagagcttgtcaaacgtctgaagcagatcggtaaagtggaagcaaatgaatttttgctgcacatggcgtacgagcgcttcagaatcgttatttttcaggacggacgggctctgattcacggtacaaacgatataaaagaagcgaattcagttctggccagagtgatcggactgtaggaaggggatgtattgctatgcttgaaaaaagaacgccgattcaggtggacgaagcagtccgccgggtgagccggtataaaaaaaagggggataccgaatgggtggcgcttgaggacagtctccaccgctatttggcggaggatgttaaggcggatcatgatgtgccggcttttaaccgttctccgtatgacgggtttgccatcagggcgagcgattcaaaaacggcttcccgtgacaatgccgtcacctttgaagtcattgaccatatcggagccggcgccgtgtcagaaaaagaactcgggccttatgaagcggtccgcattatgacgggggcgcagattcccaaaggcgcggatgctgtagtgatgcttgagctgacaaaaacgttttctgaaaacggcacgaattacatgtcagtgaaacgcccttttcatgcgggcgataatatttcatatcaaggagaagatgcgaaaaaaggcagctcgctattaaaaaagggacgaaaatcacgccgggcgtaaccgctcttttagcaaccttcggctatgcttccgttcccgtggtcagaaagccggttgtcggcattatcgcaacgggaaccgagcttcttcatgtcagcgatccgcttgagccggggaaaatccgcaacagcaacgctgccatggtgtatgcccaggtcattgaagcgggtgcagtaccgctgaacttagggaaaatttccgatgattttgatgacagctatgctgcggtgaaggaagctatgaaaaaagttgattttctgatcacgaccggcggcgtgtcagtcggcgattttgattttcttccggacatttataataagctcggagcggaagttctttttaacaaagtggcaatgcgcccggggagcgtgacaactgtcgcccgggccgatgacatgctgctgttcggcctttcaggcaatccgtccgcatgttatgtcggattcaccctgtttgtcaaaccgatgattcagacatggcttctgaatgaaaaacctcattccggatgggcggaagccgtgttaacaaacgactttccgaagccgaatccgtttacgagatttgtgagggcatttgtttatcataaggacggaaaaatgatggcgtcaccggtcggtctcgacaaatcaagctcagtcacatctcttgccgaagcaaacgcgtttatccttctgccgggaggaacgagggggtatgaagcgggccggacggttcacgcgctcctcatccgtgatgagaatggaagtgaatggccgtggtcaattctttcccgatcgtccagatcgtaggttttcaaaacagcggtaaaacaacgtttattgaacgtgtgctgaaagctgcgccgaaagagtgcgatattggatgtttaaaacatcacggacatggcggagaaccggaacctttttctgacggaaaagactcggagcgtttttcaaaagccggagccgcggttacggcagtagaaggggacggcgtcctgcagcttacggcgcgaaaaaaatgggatctggcgggtttgatcagtctgtatgaatgtctgggaattgacggtcttctcatagagggatttaaacatgcgccgcatccgaaaatcattatgatcaaaaacagcgaagattggcaaaagctgaagcatttggagcgcgtgatcgcggttgtcagcagaaatacggagcatatgccggcagatgcgggcaagcccgtattccatgcggacgatcctgctgccattatgtttgtgctttcgcagctgaaaggggaaactgcttaaatggaacgttttcaaattacaagggaacctatcattgcggaaaatatcgtaaaaaaagttgaaaagcgtgaagccggggccatcacaacgtttatcggcacggtcagagagtggactgcaggacggcggacggtgcgtctcgaatatgaagcgtatgaaccgatggctgttcaaatgctttctcaaatcggcagtgaaatcagcgcgaaatgggaaggagccgaagctgcaatcactcaccgtgtcggcgtccttgatatcggtgaagcagcggtcgtaatcgctgtgtcttctccgcacagaaaggcggcatatgaggcgaatgaatatgcaattgaacggataaaacagattgtgccgatatggaaaaaagaaatctgggaagacggggaagaatggataggcgatcagctggaaacaacgccctatccgaacggaaaaccggatttggataaaggggaatcgcgatgattaaagtattattatttgccgggcttgcggagcaggcgggaacaccggtcattgaacttgacgaaaaagagacggcagcgtctgctgtaaaaacgctgttaaaggaacggtacggccttcagacgattgacaatgccatgatcgcaatcaatgaaacatatgtaaaagacaacagcaccgtaacagaaggtgataccattgcctttatccctcctgtaagcggagggtgaaaaaagagccggatgtgcatcattgccatccggcttttttgtttataggcgctgaatttcagagaatatctaaatgggatttaaagggttttgcaattgaggcggttttcactgcatgaataggctgataacagtgcctttacaaggttttgagttacccgtcataccggtctgacgatgcttttttttacataattatggaacgtaaagctgagaatttgtgttacaatttagcataaatacgcaaacggcaaaaaaattgaaacttctctcagcctaaagcgtacgtataaacagaataatacataggaggcatcagctatatggaaccaaacctggaaaaaagcaatgcggcagtcacggaaaagccgtcaattttcggcgtcattacaagtcctgttgtgcagtttaaaagattaaaagaaaagccggtcatcggcatacctctcctgattgtcatcattctcatcgcggccggcagtattttgcgcggactggggatgaattatgaagaagtgctgaacagctcatctcttgacggtttgacggatgatcagattgaaatgaccaaaaccttcgctaaattcggcacgatgttcggaggaatcttcgggggcattatcgctctgtttatcgttccgctcatttactggctgtgcgtcaaaatgtcaggcggcgtgacaacttacaaaaaaatgctctcactcagcctgtttacggcgtttattaccaatatcggcttagttattaacggtcttgtcacttattttaccggtgcgggctcattgtacgccgttacatctttggcgagtgtcataccggccggagacggcgtcgcggtctttttaagcgcgttcgacattttcagcatctggagctatattctgctggctttgggacttcgctatacaggcggcatttcgaaaaaagcggcctggacttccgcgattgtcctgtttgttattatgcttttggtttcggcagtcggaggactgttaagttcagtgacagcaggtgtataacatgaaaaaaatttggatcggaatcggcatcgccgtaattgttgcagtatttatcggtatcaatatttataagtctgccgctcccgcgggcggcagcgccggaaaaaaaatcgaaaccggaaccatggaaaacagagaaatctcatctacggttatggttccgggaacacttaaattttctaaagaacagtatgttttttatgaagcagataaaggaactcttgataaagtgaaagtaaaagaaggcgacaaagtaaaaaaagggtcgtcgttagtcacgtatacaaatgagcagctcaaccttgataaagaacaaaatgagttgacagaacaatcaaaacggatgcaaatcgaacaagttgaagaaaaactcagagcattaaacagcaaggaacaagatctggcaaaacaagtgggagaagcggaagccaaaaaacaaattgaatccgaacggactgatctgcagcttcagcaaaaaacggcggaaatcgaattaaagcaatctgatttgcaaaagcagtctcttgaaaatcaagtgtcgaatctcaatgttaagagtgagatggacgggacggttatctcggtaaatcaagaagcggcttctaaaaaatcggatattcaagaaccggttatacatataggagacccggaacacctggtcgttgccggcaatttgtccgaatacgacacgctgaaagtgaaaaagggccaaagcgttacaatcacctcagacgccatccccggtaaaacgtggaaagggagagtggcggctgtcggcctcgttccggatcaaaagtcaagcgctgcttcgggggaaagcacggaacaagccgtccagtatccgtttcaggttaagctgatcggaaaccttccggaaggcaagccgggatttaaattaattatgaacattgaaaccgacaaacggaaagccgacacgctgccgtcctccgcagtcaaaaaagacggagatgagcactgggtctttacggtaaaagacgggaaggccaaacgcgtgaaagttaaagtcggcgataccgcaaatcagcttacggagataaaagaggggctttcaaaggatgataaagtcattctgaatccggctgacggtttgactgacggaacggatgtgaaagcatagatgattcagctttcaaaggtgaaaaaaagctatcagatcggcaaggagacgtttgatgttctccgttcaatcgacctgacgattgaagaaggagaatatgtgtcaattatgggaccctcgggatcgggaaaatctacgatcatgaatatcatcggctgtctggacagaccgacgtccggcaattacagtcttgcgggcgaagatgtttcttcatgcaccgaaaaagagcttgcggcggtccggaacaaatcaatcggttttgtctttcagcagtttcagctgctgccgcgattgaatgcaagaaaaaatgtcgaacttcccatgatctacgccggtatcggcaaaaaagagcgtgaggaacgggctgagcacgcgctggaaaaagtcggtttggcggatcggatgcgtcacatgccgaatgagctgtccggcggccagaagcagcgtgtcgcgattgcaagagccatcgtgaacgaaccgaagctcattttagctgatgaaccgaccggcgcgctggatacgaaaacaagcatttccattatggagcagttcacagagcttaatgcagagggcgtgaccgtggttcttgtcactcatgagcctgaagtggcggactgtacaaacagagtgattttcgtccgtgacggcatgatcgtttcccgcgattctgagcagaggagagtgggggaatgagcctgtcagaaaatctccggatggccctcagttccgtaagagctcacaagctgagatcgattctgacaatgctcggaatcattatcggcgtcggttcagtaatcgttgttgtggctgtcggccagggcggagagcaaatgctgaagcaatccatcagcgggccgggcaatacgattgaattgttttacatgcccagtgatgaagaattaacagccaatccgaacgccttacagcaagcgagttttacagaagaagatattaatggattaaaaggagtggacggcgtaaagcaggttgtcgcttccgcggtaaaatccatgacggcccgttaccatgaagaagacacggatattacgctgaacggcattaacagcggctacttggacgtaaaaaagctggacgttcaagatggacggacgtttacggacaatgattttctttccgggaaaagagcgggaatcatctcgaaaaaaatggctgaaaagctgttcgggaaaacgtctccgctcgggaaaatcgtctgggccggcggacagcccgtagaagtaatcggcgtactgaaagaagagagcggctttttatcgttaggactcagtgaaatgtatgtgccgttcaacatgctgaaaacgtctttcggtactaacgactacagcaacgtttccgttcagacggagtccgctgatcaaatcaaaacaacaggaaaagaagcggcccgtctcttaaatgacaatcacggtacaaaagaggcctatcaagtcatgaatatggaagaaatcgcggcgggaatcggtcaggtcacgaccgttatgacgacgatcatcggttcgatcgccggtatttctctcgttgtcggcgggatcggggtcatgaatattatgctcgtatcagtgacggaacggacaagagaaatcggcatccgcaaatcgctcggtgccacgagaggacagattctgacacaattcttaattgaatctgttgtgcttactttaatcggcggcttaatcggaatcggtctcggctacgggggagcaacactcgtttcccttatcgcaggctggccgtcgctcgtttcctggcaggtggtttgtatcggcgtgctgttcagtatgctgattggcgtcatcttcggcatgctgcccgccaacaaagcatcacgcttagatccgattgaagcgttacggtatgaataaccggcgccccatgcagtctgcatggggttttttgtgttttaatgattgaatgaatataatagacttttttcatttatgataaaaagaaaatgtcatacaattgtcccctttttgtcgaatttacagtttacaaaccctatgtacatacgttaatatgaacaaatgtgaaagattttgatagttattgaatgaatttgagtgattttagttgcttgaagtaaaaaaagcgtttacaattatcttgcagccgaaatgaatacgttttcaaaggaggcggaatatgctcactcctgaaaggtatcagctgattatggatcagattgaaaagcgagatgtggtgaagattcaagagctgataagcatgacaaacgcttctgaatcaacgatcagaagagatttatcaacacttgaagagcgcggatttttaaagcgcgttcacggcggggcgtctaaactttccaacagcaggcaagaacccgatatgcttgaaaaatcctccaaaaaccttcaggataaactgaagatcgctgaagaagcggcatctttattagaagaaggtgactgtatttaccttgatgcgggaacaactacattgcacatgattgattttatagatcatacaaaggacattgtggttgtcacaaacggggttatgcatatcgatgctttaataaggaaggggattcctttttatcttctcggaggatatgtgaagcatagaacaggtgcgatgatcggcggcgcctcattaacggcggtcagccagtaccgttttgacaaaagctttctcggggtgaacggcgtgcacattgaagccggctttacaacacccgatccggatgaggctcttctgaagacaaaggctgtgagacaggcgaaaaatgcgtatgttttagccgatccttctaaattcggcgagatttctttcgcagcgttcgccgccttgggcgatgcagctatcattaccactgaagctgaagaacttgcattcgatgattaccaagaaaaaactgtcgtaaaggtagtgaaaccatgatttacactgtaactctcaatccgtctgttgactatatcgttcacgttgaagattttgccgtaggcggtttaaaccgttccagctatgacacgaagtatcccggcggaaaaggcatcaacgtttcgagattactgaaaagacaccatgtgccgtcaaaagcattggggtttgtcggcggatttaccggaaattatatcacgtcatttttgcagcaggaaggtctggaaacggctttttctgaggtggatgaagacacgcgtataaatgtaaaactgaaaacgggcgatgaaacggaaattaacggacagggcccgacgatttcagacgaagtgttcaatgcctttttagaacagttctccgctctggaagagggagacatcgtcgttttagcgggaagcatcccttcttccctgccgcataacacgtatgaaaaaattgctgaggcatgcagaaagcagaatgcccgggtagtggtggacatctccggtgaagcgctgatgaaagcgacagaaatgaaaccgtttttgatgaagccgaatcatcatgagcttggggaaatgttcaatacggtcattgattcagccgaagctgccgttccttacggtaaaaaattaattgaacaaggcgctgaacacgcgattgtttcgatggctggcgacggtgcgcttttatttacgaaagaggcggttttcctcgccaatgttcctaaaggaaagcttgtcaattcggtaggcgcaggtgattccgtcgtcgcgggattccttgcgggaatttcaaaacagctgcctttggaagatgcgttccgtttaggagttgcttccggaagcgcgacggcattttctgaagaactcggaactgaagagtttgtacagcagcttcttcctgaagttaaagtcacacgtctatagaggaggaaagaaaagtgaagataactgagctgttaacaagagatacaattcatctcaatatagaaagcaaagagaaagaaaacgttatcgatgaaatggtgacagtgcttgacaaagccggcagattaaatgacagagaggcttacaaagcagccattttaaatcgtgaaagccaaagctcgacgggaatcggcgaaggtattgccattcctcacgcgaagacggcgagcgtcattaacccggccattgcattcggccgttcaaaagatggtgtggattatgaatcattagacggtcagccggcacacttggtctttatgattgcggcaaccgaaggagcgaacaatacgcaccttgaggcattatcaagactttcaacgcttcttatgcgtgaggaaatccgcaaacagcttcttgaagctgaatcagaagatgcgatcattgacatcatcaatcagcatgacaaagatgacgatgaggaagaagaagagcaggaagaacaggcagcgccgtcaggaaaagggaaaatccttgcggttacggcatgcccgacaggtatcgctcatacgttcatggcagctgacgcactgaaagaaaaagcgaaagagctcggcgttgacattaaagtcgagacaaacggctcaagcggtattaaacataagctgacggctcaagaaattgaagacgcgcctgcgattatcgtggcggctgataaacaggttgaaatggagcgctttaaaggcaaacatgttcttcaagtgcctgtgacggccggtatcagacgtccacaggaactgattgaaaaagccgttaaccaagatgcgccgatttacgagggcagcggcggaggatcttccgcttcaaatgaagacggtccgaaacagaaatcaggcacaagcatcggaagtactttctataaacacttaatgagcggtgtcagcaacatgctgccatttgtcgtcggcggcggaattctcgttgcgatttcattcttctggggaattcattcagctgatccgaaagacccgacatacaacacgtttgctgcagcgctgaactttatcggtgacggtaatgcgttaaagctgattgttgcagtacttgccggattcatcgcaatgagtattgcggaccgtccgggatttgcgccgggtatggtcggcggatttatggctacgcaggcgaatgccggattcttgggcggactgattgcgggattcttagccggttatgtcgtagtccttttgaaaaagctgtttgtctttattcctcagactcttgacggattaaaacctgtattgatttatccgctgctcggtatttttatcaccggtgtcctgatgcagtttgtcattaacacacctgtagcagcgtttatgaatttcttaacaaattggcttgaaagccttggaactggaaaccttgtcttaatgggtattattttaggcggtatgatggctatcgacatgggcggcccgctcaataaagcggcgttcactttcggtatcgcgatgatcgatgccggaaactatgcgccgcatgcggccatcatggcgggcggaatggctccgccgcttggaatcgcactggcgacaacattctttaaacacaaattctctaaacgtgaccgtgaagccggtattacgtgctacttcatgggagcagctttcgttacagaaggcgccatcccgtttgcagcggctgatccgcttcgcgtcatccctgcagccgttgtcggttctgcggtagcgggcggactgacagagtttttccgggtaacgcttcctgcaccgcacggagggatattcgttgcattcattacgaaccatccgctgctttacttaatgagcatcgtgatcggagcgattgtaacggcggttatcttgggaatcatcaaaaaaccggtagtagagaaataagcgaaaagcgtcctttacgggcgcttttttcaatcatatacgcatagaagcgttatgtattttgtgatgagttgtgataaagtaaagatggtacatgaaccgaaacagtgatcgtctaggaggaaccacgttgactgaagaacaaaaacctacttctgaaaaatcggtaaaaagaaaatccaacacgtattgggaatggggaaaggccatcattatagcggttgcacttgcgctgttaatccgccatttcctgtttgaaccgtacttagtggaaggatcatcaatgtacccgacattacatgacggtgaaagactgtttgtcaacaaaagcgtcaattatatcggagaaatcgagcggggggacatcgtcattattaacggcgatacatcgaaagtccattatgtaaagcggctcatcggaaaaccgggagaaacggtggaaatgaaaaatgacacgctttacataaacggcaaaaaaatcgcagaaccgtacctcgcgagcaataaaaaagaagcgaaaaaactgggagtcaacctgacgggagatttcggccccgtaaaggttccgaaaggcaaatactttgtcatgggcgacaatcggctgaactcaatggacagccggaacggcctcggcttaattgccgaaaaccggatcgtcggcacctcgaagtttgtgttcttcccgtttcatgatatgcgtcagacaaaataaaaacgccgcgctgcccgattcggacagcaggcgtttttatttggcaaacgaggccgcgacggcgatgaacaataccgtggccagcactgatccgacaatggccagaacgctgaaaaaaagattcacctgcttcttctctttgccgcgtctttcaagcatccgtttggaaaagagatgcgaaaacgtataaatgagggcgattccgacgtacaagccgatgtcacgtgccgtaaagcctgtgacggccagaaaaaccccggtgaagaaaatcataagacagtattctgtgagtgttaaaagcttcaacttgttcctccgtgatgaatatgtatatatatctattgtatcacagcgctccgggtttgacgcctgcatcttttcaaacccgtatattcgcagggaaacatttctcttcccctttattcatggtatacttttaatgatgatagacacgatggaggattctaaatgattgctgtaaataatgtgagcttgcgttttgcggatcgcaagttatttgaagatgtcaatattaaatttacgccgggcaactgctacggattaataggcgcaaacggtgccggaaaatcaacatttttgaaaattttatccggtgagctggagcctcagaccggcgatgtccatatgagtccgggcgaacgtcttgccattctgaagcagaaccactttgaatatgaagactgcgaagtgctgaaagtcgtcattatgggacataaacgtttatacgaagtcatgcaggaaaaagacgcgatttatatgaagcctgatttttcagatgaagacggcatccgcgccgctgagcttgaaggagagtttgcggaattaaacggatgggaagctgaaagtgaagccgctattttgttaaaggggctgggcatctctgaagacctgcatacgaagaaaatggccgacttaggcggttcagaaaaggtgaaagtgcttttggcacaggcgctgttcggcaagccggacgttctgctgcttgatgaaccgaccaaccacttggatctgaaagcgattcagtggctggaagagtttttaatcaactttgagaacacagttatcgtcgtatcccatgaccgtcactttttaaataaagtgtgcacgcacatcgccgatcttgattttaataaaattcaagtgtacgtcggcaactatgatttctggtatgaatcaagccagcttgctttaaagctttctcaggaagccaacaagaaaaaagaagagcagattaaacagcttcaggagttcgtggccagattcagcgccaacgcctctaaatcaaagcaggcgacatcaagaaagaaactccttgataaaatcacgcttgatgatatcaaaccgtcatcacgccgttatccttatgtcaatttcacgccggaacgcgagatcggaaatgacgtgctgcgggttgaaggcttaacaaaaacgattgacggggttaaggtgcttgataacgtcagctttattatgaacagagaagacaaaatcgcatttacgggccgcaacgaacttgccgttacgacattgtttaaaatcatttccggggaaatggaagcagacagcggcacatttaaatggggcgtgaccacttctcaggcgtacttccctaaagacaacagcgaatattttgacggcagcgatgcgaaccttgtcgactggctccgccaatactcgccgcatgaccaaagcgaaagctttctgcgcggtttcttaggacgcatgctgttctcaggagaagaagtcaacaaaaaatcaaacgtcctttccggaggagaaaaagtacgctgcatgctttcaaaagcgatgctttccggcgcgaatatcttaattctggatgaaccgacaaaccacttagatttggaatccattacagcgcttaacaacggcttaatcagctttaaaggcgctatgctgttttcatctcatgaccatcagtttgtacagacaattgccaatcgcatcattgaattaacgcctaaaggcattgttgacaaacaaatgtcttatgacgaatttcttgaaaacgcggatgtgcagaaaaagcttgaagagctatacgcgtaataaagaagcaggggagactctgcttttttatttatgaaaaaagttttcaatcttctgacttcccattacaataaaggaatacataaattgaaaagagacggaggaatgcatcatgaagtttttagttgtcggagctgggggagtgggcggatatatcggcgcgcgtcttgcagaaaagggaaatgacgttacatttctcgtccgcaagaaacgggcggaacaattacaagaaacgggtttgaccgtcaaaagtgcaaaaggtgatgtttcaatcaagccgaaattaatgttggcgggcgaagaaggagcatttgacgccgttatcatcgcttcaaaagcgtattctttgcaggacgtcattcgggatgtcaaaccgtttgtcaagccttcgtcggtcattattccttttttaaacggatacaggcactataaccagctgtttgaagctttttcaaaacggcaggtgctgggcggcctctgctttattgagagcgcccttaacgacaaaggggaaattcttcatacgagcgctgcccaccgttttgttttcggtgaatggaacggggagcgcacagaacgtatgaatgagctggaaaacgcatttgcaggcgtgaaagcggatgtcatcatcagcggggatattgaaaaggacatttggaaaaaatatatgtttattgccgcgcaggcgggagtgaccactctgtttcaacagccggtcggaccgattttagaaacagaaggcggccgcagcacggcaaagcgcctctttgctgaaatcggagccattttcaaggctgccggcatcccgaaagatcctggtctggaagaagagagttatcgcacattgacaagcatgtcttaccatatgaaatcgtcgatgctgagagatatggaaaagggcagggtgacggaaggtgatcatttacacggctttttgcttgagaaagcgaaaggcttgtcaattgatacacctgttttggaaaccgtcttcgccaacttgcaaatgtatgaagcgaaataaaaaggaggcctgatcgcctccttttttttattaaaatgcccagtttccgtttctgaagatcggttctcttttgccgtccgcggtaatgccgtcgatattcatttctttggaaccgaccataaaatctacgtgtgtaatgctttcatttaagccctctttgacaagctcttcccgtgtcatttgtttgccgccctcaatattaaaggcatacgcactgccgatcgccaagtggttagaggcgttttcatcgtacagtgtgttgtaaaataaaatatttgattgtgaaatcggtgaatcgtacggcactaaggccacttcaccgagatagtgtgagccttcatcggtttcgacgatgccttttaaaatctcctcgcctttttcagctttcacatcgacaatgcgcccgttttcaaaggtaagagtgaagttatcaataatgttgccgccgtagctaagcggtttcgtgctggaaaccgtgccgttcaccccgtcacgctgcggaagggtgaaaacctcttctgtcggcatgttggccatgaattcgtgcccgctttcattcacgcttcccgcgcctgcccatacatgttttttcggcagttcaatggttaagtctgttccttcagcctgataatgcagggcgctgtaatgttttttgttcaggtgttccactttttcatgaagattttgatcgtgttttttccatgctgccacagggttttcttcatttacgcgggttgttttgaaaatttcttcccataaaagctgaacggctgtttcttccggctgatccgggaacacttttttcgcccagcctgttgaagccgctccgatcaccgtccagctgaccttatctgattgaatatattgtctgtatgtatgcaatgcttttccggcggctttttggaacgctgcaatccgtttgccgtcagcgccttttaacaggtcggggtcggatgagacgacagaaataaacgcagccccttttttcgcgagctcttcttttccttttgcttcccattcaggatactcttcaaacgcttcaaaaggtgccatctcgtattttaatctggacagttcatcgtcctgccaatttacggtgacgttttttgcgcctttttcataagaatgtttggcaagcagtctgacaagttcccggacatcagttgaggcattgattacgacatgctgtcctttttggacattgacgccgacttctaccgccagctgagcatatgtatttaacttttcagtaaacgaactcatcgttcattcctcctcatcggtttttctcatcatatcaaatatcgcctcataaaggaaaggaaggagcacaaacgaaaaagacacagcttttgctgcgtctttacggatgattcagttttacggcgccgccggccggagaatggggcatattggccagtgaaatgctcataccccccaaaataattccgcttaaaatgacggctactgctacgcgtcttcccacatctctaagcatatgcttcctccttaatgtttctccagttctcacaatatgagccggccggagaaaaaagaagcacaatcttattatttaatcgctttttgcagcttgtcgatgacgtctaatgaacgtccagtgccgatagccactgattcaagcggatttgccgccaaatgaacgggaacgacgatttcatctgtcagccattctttcatcccgtttaaaagggagcctccgccggttaacacgacgccgcggtcaacgatatcaccgctgagctccggcggacaatcttcaagcgtcgctctgatcgcttcaagaatatgcaggagcgactcacgcatcgcgtgctgaatttcattagactgcagtctgattgtcttcggcagaccggttacgaggtcacgcccgcggatttccatcgtttccggcacatgttcgatcaatgcaaatccgatttccattttcacttgttctgccgtgcgttccccgatcagcaggttgtatttttttctgacgaacgaggcgatatcttcatcaagctggtcgccgccgattctgatcgagtggcaggatacgacgcccccgaatgagatgatggcgacttcagtcgtaccgccgccgatatctacgacgacgtttgcgaccggctcgtcaacagggaggtcggccccgattgcagcggctacgggttcttcaatcaagtgaacgtttttcgctccgcagtttttgacagcgtcactgatggcgcggcgttcaacggccgttgagcctgaaggcgtgcagacgacgacattcggtttgcggaaggtcattccgattttttttccggcttttttcataatgtgttttaataagtcagttgtcatatcataatcagcaatgacaccgtctttcatcggccgtacggcgacgattttccccggcgtctttccgatcatgcttttggcatccgttccgatggcaagcaccgctttcgttgttgtatctacagcgacaacggaaggctcatttaaaataattcctttatttttactgtaaacaagtatattagcggttcctaagtcgattccgatctcagttgattgaaacatgttttcacccaatccctatcctgatttaattgattctacatttaaagtttctgagaaaaaccacgatttttgggggtttccgccgggaatgaaatgtttttgtaaaaaaggagggaaagtctgtatcccgtatttcaaaaggctttcttttgtaaaaaacattcatttccggatgctgagaaacttttgctccgttcctttcgtctacgtttatgaaggattttccttggacataaagaagagacattaaaggaagtaggggatttctatgaaatcaattggtgtagtaagaaaagtagacgaactcgggcgtattgtcatgccgattgaattgcgaagagcattggatatcgctattaaagatagtattgaatttttcgttgacggagacaaaattgtcttaaaaaaatacaagccgcacggcatttgcttgatgaccggggaaattacctccgaaaatcaggagtacggcaacggcaaaattattttaagtcctgaaggagcgaaaatgctgcttgaggaaatcgaagaagcgttaaaagatagatcataatcagcaaaaagggcggggcatcattccgtccttttattatgaacttgtgcaaaaactcacgggaaaagtaagcgaacctgctcaattaattgggaatagttatcattttttagtcaataatgcagtcaacaatgttacaatatatgtagaaatgttagcggcaggtgggactatgggaaaatatcaagcgcgtatcatttccttaatcttggcaatgatttttattatgttttgggattatttattttatatgattgaacggaatccgattaactggcccgttgacatcacctttaccgccgtcacattaatcagcgtctggctgctggcttattatgtggacaataaaaagcagctgctggcggagctgaaggacagcgagcagaaagcaaaggcgctttcagatgagaaaaaccggatcatggacaatctgcaggaaatcgtttttcagacggattcacaagggaatattacatatttgaatcaggcctggacgacgattacgggccactccatcagcgaatgtatgggcacgatgtataatgattattttataaaagaaaaacatatcattgattatattatctcccaaatcaagcagcagtccccgtcaggaatgtttacggccaaatatattaaaagagacggcacgatcttttggggagaagtccattataagctgtattatgaccgcagacagaaatttgtcgggagcctggggacgatgtctgatatcagtgaacggaaaaaagcggtcgacgagcttctggaaacgaacgaacgccttgccatgcaatctcaaaagctggccattgccggggagcttgcggcaggaatcgcccatgaagtaagaaatcctttaacgtcagtcagcggctttctccagctgatgaaagcccagtatccggaaagaacggattatttcgatattattttttcggagattaaaaggattgatctcgtgctgggggagctgcttctgctcgccaagccgcagaccgtgacgtttaccgctcatcatctcaaccatattttaaggcaggtggcgacgcttcttgacacgaacgcggtgctgtcgaacactgtgattgagaaggatttcaggcagactgagtcctgtatggtcaacggtgacgaaaaccagctgaaacaggtatttatcaatattattaaaaatgcgattgaagcgatgcctgacggcgggaatattcatatttatacagaacgggatgaagaatacgcggtgatcagcatacaggatgaaggaaacggcatgtcgaaagaaaagcttgaaaatatcgggaaaccgtttttctccacaaaagatcagggaacgggtctcgggcttccgatttgtttacgaattctgaaggagcataatggtaaacttaacattaagagcaaaaatggagaaggcagtacgtttcaggtgattctgccgttagaagcggctgctgtccaaaaggaggaaaaataacttgcttctttttgtatacggtttgttacggaagcgtgaagaaaaccatgaactgctgaaaggcgctctatgtgtgtgcgagcaggccgcgataaacggtgtgctgtacgaaacggataaaggtcagcctgcggcgtctttagcagaaacagcttttgtgtacggggaattgtatgaaacagatcatcagatgatccgtaagctggatatgtattatgctgattttgaccggaaagaggttgccgtgacgacggatgccgggaataaaaccgccttcgcatatgtcgtaaagcccggccagtgtgcctcattcagccgtatcaaaagcggagactggaaagaataccgttttatgaaacgggaggatgacagtccggtttattatttcgcttacggctcctgtatggacaatgcccggtttaaacaggcgggggtcgaccacttctttgccgagccggtcggaggggcggttgttgaagggtattcgacgagattcacgttaaggcgtcctgacggttccagagccgatcttgttgaagacgggggacgaactgaaggcgtgctgtacaagctcccgtttgaagcggcaacctatctgtacaaaagagaaggtgttgataatcacacataccgtcccgcgttcatagaagtgtgtgccggcggccgtgtatacagaggcgtcctgacgtttctggttcttgataaagcggaggaaattgcgcctccgggtcactatcaggaagaaatcgaacgcggagcggacctgtatttatcacccgccttttcagaaaagcttaaacgctatatgaactcattgccgaaaatgtgatactattcctattagagatattgtttaaaggagtactgttatgagaaaagagtttgccgttatcggtctcggacgcttcggcggaagtatttgcaaagcattaagtgaagaaggccttgaggtcatggcgatggatattgatgaagataaagtaaatgaatacgccaaaatcgcatcacacgcggtcatcggcgattcaaccgatgaatcggtgctgaaaaacttggggctgcgcaactttgaccacgtcattgtggcaatcggcgaaaatatacaggcgagcattttaacgacgctgatcttaaaggaactcggcgtgaacacgatcacggttaaagcgcagaacgattatcatgagaaagtacttgcgaaaatcggggccgatcacatcgtccaccctgaacgtgacatggcaaaacgcatcgcccacaacatcgtatcaaataatgtgcttgattatttggagctgtccgacgaacacagcattgtggagatcgtggccaacagcaggcttgcgggcaacacactgcttgatctggacatccgggcgaagtacggcattaatatcgtggccatcaagagagaaaaagaagtgatcgtatctccgctggcgactgaaatgatccaaaaagaagatattctcatcgttatcggctctcttacggacatttcccgatttgaaaaaagagtgcttcatacaaagtgaaaagccgtccgtaaaaggacggtcttttattatgtcagaatagaaagacatttatcatgtaagcggtatattctgcaatttttattgactatgatcaggcgatccgatagcatattgtaccatataaagaaaaagaggaggccgcattttgaacaaagaaacactggctgaacggctgaatgcatcagccggcagacaaaaagccgataccgtcattaaaaacggaaaaatcatggatgtatttaaccaggaatggatttctgcagatatcgccattacgggcggagtgatcgtcgggctgggcgaatatgaaggggaagaagtcattgatgcagaaggccaaatgatcgttccgggctttattgacggacatgttcatatcgagtcctctatggttactccgattgaatttgctaaagccgtcctccctcacggagtgactactgtcattactgatcctcacgaaattgcgaacgtttccggagcaaaaggcatttcatttatgatagagcaggcgaaaaaggcgccgctgaacatccgtttcatgcttccttcctgtgttcccgccgctagctttgaacgctcaggagctgtattaaaagccgaggatttaaagcctttttatcaggagaaagaggtgctcgggcttgcggaagtaatggattatgtgtctgttgcggaaggtgaagaggatatgcttcagaaactgcttgatgccaagcgtcacggaaagcggatcgacgggcatttagccggactgtcttcagatatcatcaatatatacagaaccgcaatggtgtcaaatgatcatgaagtgacgacaaaagaagaagcgctggacagaatcagacggggaatgtacgtcatgctgcgcgaaggatcggtggcaaaaaatacgctcaacgtgctgccggcggtgaatgaaaaaaacgcgcgccgctttttcttttgtacggatgataagcatgtagatgatctgcttacagaaggaagtgtgaaccaccaagtcaaaatggcgataaaggcgggacttgatccattccttgcgtatcagctcgccagcttaaatgcggctgagtgctacggccttgaaacaaaaggggcggtagcgccgggttttgacgcagatctgctgttcatttcagatgtacgggaggctgccgtcacgaagaccatggtcgccggccggaccgttgccgagaacggacggacggtttatgaacagtctgccggttcctattcgccggaccaggcactgttggatacagtgcggctgaaagcgccgctgactgaatcggattttcatataccgattcaagagggcaggaaaatgaatgtaatcgaaatgataccgaatcatttggagacgagaaaaaaagaagtgcctgcaccgtctgctgacgcgtttcgacctgatacagataatgatttattaaaaatcgccgtcgcagagcggcacagcggcgaaaaaatgataggactcgggattgtacaagggttcgggttaaaagaaggcgccatcgccacaaccatttctcacgattcccataatatcatcgccgtcggtacaaacgatgccgatttggcaaaagcaatcaacaagctccgtgacaccgggggcggattaacagccgtgaaaaacggagaattgcttcactccgttccgcttccgatcgccgggcttttgtctgataagtcggcggaatgggttaatgacagcttgggcgtgcttcatgaaaagcttcctctgcttggattcaccggtgatttcaatccgtttctcaccttatcgtttttagcccttccggtgattccggatattaaaatgacggcggccggtctgtttgatgtcaaagcctttcagcatattccgctgcaataaaaaaactgcactcgtaatgagtgcagtttttttagacctccataatgatcggaaggatcatcgggcggcgttttgttttttcgtataggaacggagcaagcgtatcggtaatttcgtttttaatttcggaccactgcgttgttttccgatccattactttctccagatggtttgaaatgagctgctgcgcgtcattgatcaaatcaccggattctctcatatatacaaaacctcttgagattaaatcaggtcccgccgaaaccttaaagtcgtccatattgatgctgacaacaacgataacaaggccttcttctgaaagaatgcgacggtcgcggagcacgatattgccgatatcaccgattccgcttccgtcaatgtaaacggagcctgacggaattttgcctgccacagcggcttcttcgcctttgagggccagcacttcgccattatccatgataaaacagttttcttcaggtatgccgcaatcagtcgcgagtttgacgtgcattttctgcattctgtactcaccgtgaatcggcataaagaacttcggtttgatcaggcggagcattaatttctgctcttcctgtccgccgtgtccggatgtatgaatgtcattcaatgaaccgtgaatgacttctgcgcccgcacggtacagctggttgatggtgcggcttacgctgattgtgtttccgggtatcggagaggaagaaaagacgaccgtatctccgggattaatggaaatctgccggtgcgtcccgttagcgatgcgtgataacgccgccatcggttcaccttggctccccgtacataaaatcgttaccttattggcaggcatacgattgatttcgttatgctcaataaacgtatttttaggacaggtaatgtaaccgagattttgtccgatttcaatagccgattccatactgcgtccgaatacggcaacttttctgccgtttaaaacggctgcttcaatcacctgctgaagacggtgtatattcgaagcgaatgtcgcaaatataattctgccgtccacttttcggaaaatatcgtgaatgctttcgcctacgcggcgttctgacatggtgaaatcaggcacctcactgtttgtactgtcagaaagcaggcacaaaacgccttctttcccgatttcagccatctttgtcaagttggccggttcgcctaccggtgtgaaatcgaacttaaagtccccggtatgtacgatattgcccggcggtgttttgacgacgattccgtatgaatccggaatgctgtgtgtcgttctgaagaaggatacagacgtcttgcggaacttcacgatgtcgtcttcaccgatgatgtttaatttggtctgtcttaacagcccgtgctcttcaagtttattccgaagtaagccgatcgcgagtttaccgccgtaaacgggaatatttacttgtctgagcaggtacggaataccgccgatatggtcttcatgaccgtgggtgataaacagacctttaattttatcttcattttttactaaatacgtgtaatcggggattacgtaatcaatgccgagaagttcatcttccgggaacttgattcccgcatcaatcagtacaatttcatcctgaaactgcaccccgtacgtatttttcccgatctcgcccaatccgccgagggcgaaaacggcagtctggtcattttttacaaatttcattccgctcataactccaatactttaaaattttcgctctgcttctcatattctaaaaaagcaccgtccacaggctgaacaaattcaatgttgtatttctgatctttcagtttcgttctgacgtcccgttctgaaacgccctcaatgtaaagtgaatctgttttttcccgaacaggtacttcgtcagccttctcttgataaaataccttataaatcatccaaatctctccttaaatgccgtatgttagactcgctgattctattatattcgaaaacggattataaggaaagtctcgagcaaaaaagggactttcaaaaaccgaaagatcccttctatgcgatgacttttttccggagcattccgccccactgtcttctgagtttcttccgtaatcggcgcagcatcgtatacctcctttaaagccctttatagcagtagtatgcggaaaaaatgaatttgttttcgtgggtaaaactggaatttcatcaaggcggttttccggaagaaaaactttctgtatgatgatattgaaaaagacacgactgataaacgggaaaaaggagaaattgacatgaaaccaaaactgatcttttttgatattgacggcacgatctatgaccatgataaacatattcccgatagcgcaagaaacgccgtgacggcgcttaaagaggctggacatcacgtttttatcgccagcggaaggtccccgtttatggtaaaaccgattctggaagagcttgagattgaatcatttatttcatacaacggccagtatgtcgtatttgaaggtgaggtcatttataaaaatccgcttcctgaagatgcggttgcgcgtttattaaagcaggcggcagaaggggagcaccccgtcgtatttatggcggaagacacgatgaaaacgaccgtccccggacatccgcacgtctcggaaggtatcggcagtctgaaagcgccttatcccgaagttgatgaaacattttataaaggaaaagaaatttatcagctgcttttattctgccgcggacatgaagaaaaagcatatgccgcttttccggagtttgattacgtccgctggcatgaattgtcaacggatgtgcttccgaaaggcggttcaaaagcggaaggcattaaaagagtgcttgagcggcttccgtacggcgtaagtgacacttatgcattcggcgacggactaaatgaccttgagatgatccgttttgccggcaccggggtggcgatgggaaatgcggttccggaattaaaagctgccgccgatttcgtcacaaagccggtggatgaagagggaatcagctgggccgtcaaagaactgggccttttgaaataaagaaaaccggcactttgggaagtgccggtttttttaacggtcaatggcaatggcgttttcaggttctttgaacggattttctttatcgatatgatcgtaaaacatcacgccgttcagatgatcgatttcgtgctgaaacacgatggccggaaaacctttgaggcggatgtcaatctgttctccttcaagcgtcaccgcctttacgcggatgcgggcgtagcgcggcacatagccgggaatgggttcgtctaccgacaggcagccttctccgctcgtcaagtagcttttttccactgagtggctgacgattttagggttaaaaagagcatagctgtataaagtgcctttcgcatcttctgcatggacggcgatcatccgtttttttacgtctgtttgcggagcggcaagaccgacgcccggacgaagcttgtatttctcggctaattcaggattttggctgtttttcacaaactcaatcatatcagcaagatgctgtttttcttcgtcggaagcgggaagctgaacctcttcagcgatctctctgagcgcgggatgtccgtcgcgtacaatattttccatagtaatcaagaaacttcactcctaaagcttaatatgtaaattatagcgaatttctttatcgcggcgcaacgaaacaattggccggccatagcaggccggccgattttcatggtgtataaggtcagcagccgcagcctaaataagcggcaccgacgatgattaataagataaacaatacgacgattaatgcgaatgtgcggccatatccgccgccgcagccataaccgtaaccgccataaccgtatccgccgcagcaaccgccgccaaatccgccgccaaatccgccgccaaatccatatccgtacataaaaaaacctcctcttttaattacgctgaccctttgtcagcagggccggcgtctactataaactatgtaaaagccaaaaagatgtatggtcatccgccctgttttctcaattttttacgcaagtattctttgacagcaccgtaagcatctttttacccggtcatgccaattacagctcagctattgtcaaaaagcgttcgggcttctatagtggaaattgtcaagattgggggattttaagtgaatatgattcaaaaaaaggtattagcaggaatcggagcgctcggcgccgcaagtatgctgcttgcgggctgcgggggaaaagatccggttgaatcgcttcatgactcgatggaaaaagccgttcaagcggaaaaaccgtttcaaaaagagcagaaaacattggaaaaattggagaaaaaagagcacaagctttacgacagcgcggttaaactgaatatggatgattacaagaaaatcgtcacactgtctgatcaggctctgagcaatgcaaatcagcgaaaaaaacatctgaaagcagaaaaagacagtattgatgattcaaaaaaagcatttgaatccgcaaaaaaaacttctcaagaaataaaggataagaaagtaaaagaaaaagccgggcatgctgtcgctttaatggaaaaaaggtatgcatcttatgatcttttgtacaaaaagtacgaaaaagccatttcacttgatcaggacctttataaactgattaaagataaaaagctcacattatcgcagctggaagagcaaatcggcaaagtaaactcagtttacgaaaaagtgcataaacaagcagatgagttcaatcaatttactaaagactacaacaaagagaaagaactattattccgcgaatagtatagtgaaggcatatcggcatgggctgatgaactgataacaaccgagttcagccgcctgtaaatggcggctgaagaattggtatatacgtgtgtttcccattgacaacatgtaaatcatggtatagtatttatttagggaaatattcacataaaaccaatcgttgtttcggcacgttgggatgtttttattatattgatatataaaaaacagaatgaaaatgcggttttaattatcagaaaattctatctattatttgcggcaatatgatctttgtacatgctttttgcttttaaacctttatccggcataaaggtttttttattttgcttcgtaatgcttattaagtaatggtgccgggtgcttagagtaaatgacaattttaaaaattgaagtgaaaaatgttaaacaaatcacaatcggaacgaaaagaaacggcagaaatacggaacaaggaggaaaacaaatgcttgcttacgtctttcccggacagggagcgcagtttaaaggaatgggcagagacttattcgatgaattcagtgagctcattaaaaaggcagatcatattttaggatactccataaaggatttatgcctttcagatgaaaaagagaggctcactgatacgaagtatacacaacctgcaatttatacagtgagcgcactgcaatatttaaagggtttaaaagaaggtcatactcgccctgatgctgttgcaggacatagtctgggtgaatatactgcgctttttgcggccggtgtttttaattttgaaacaggtctccggctggttgctaaaagaggcgagttaatgagtgaggcttccgagggcggaatggctgccgtgatcggactggatgagcatcacataaaaaaaatacttcaaaagtatgaattcggccaaatagatatcgccaattacaatacatcttcacaaattgtgatagcaggggctgcagaagagataaagcgtgcagcctctttttttgaaaaagaaggggcgaaagcttatatcgtattgcaagtcggcggagcttttcattctcgtttcatggaaagtgcacagcgtgaatttgcggaatttatcggggagtttcatttttctgaattgaatttcccggtcatctctaactatacggcaagaccttataaacaagaagatatcaaacggaatttaattgaacaaataacaaactcggtgaaatggactgaaagcatcaggtacttaatgggacaaggcgtcactgtgtttgaagagatcggtcccggaaacattctgactaaattaattcaaaccatacaaagagatgaggaaccgcttaatattagtgcgccaaaagacagtctcttgttttctgaagggaacaaggacaattccgaaagcgggaaagagaagggcctcatggccgaaaatatagaaagcgttgcggcttcaccggtgtcccgattgggtgatcaatctttcaaagaagattacggtttgacatacgcgtatttggcaggtgcgatgcatagagggatctcttccgctgaaatgctgatccgcctcgggaagaaaggaatgctggggttctttggcacagcgggtttaactataagggaaattgaacaggcccttatttctattaaggagacactcaaaaatggccagccctacggaatgaatctgcgatttgagccggatcatcaagatagagaaaaggaattgatagatttatatatcaagcatgacgtacgggtaatagaagcgtcttcgtatctttccgtcagcgcgccattaatttattacaaagcgcatcagttgaagatggacaaaagcggcagggtcatacctcataatcggatcattgccaaagtttcacggccggaagttgcggccgcatttctgagtccgcctccccaaagtatcgtaaagagaatgtgtcagcacggtatgctgacggaagagcaggcggagtggctcagccgtgttccgtcagcagacgatatcattattgaagcagattgcggcagtaataccgaacagggctcattgacggcgatgctgccgttttttgttaacctgcgggatgaaatgatggaaacacataaatacgcaaggaagatcagagtcggggccgcgggaggaatcggaactcccgagtctgcggcgtctgcttttttaatgggcgctgattttattatgacgggatccattaatcaatgtacagttgaagccgcaacaagcggttttgttaaagaaatgctgagtgagacagaaatatgcgatactgcttatgcgccttcggagactctgtttgagttcggaacaaaggttcaggtgctgaaaaagggcacgctgtttccggtcagggcaaataaattatttcaaatctaccaacaatatgagtctttgagtgagatagatgaagagacaaagattcagctcgaaaatgtttattttaataagacttttgatgaaatctacgaaagcataatagaaaaacagccgaacctggcccaaaaagcggagcgcaatcaaaaatataagatgctgttactatttaagtggtatttgcagagaggatgtctgcttgctttggaaggggaggaagaacaaaaggtgaatttccaagttcattgcggcccgtctttaggcgcttttaaccattgggtaaagggcacggagttggaatcatggagaaacagacatgtcgatgacattggtgaaaaaatgatgaatgagaccgaaagtctgctaagacgcagattggatacgttatttctacactaaaaaggggcgggtggaggccaatggttcatttgaataaacagagtgcggatatcgcgataatcggggttgcttgcagattccccgatgcagatcattatcatgaattctgggaaaacataaatagcggcaaagattccatccgggaagtgccgattgaacggtgggatcccgatctttattactcagctgatatcagtataccgaacaaaacaatcagcaagtggggaggttttattcataaagctgaccatttcgaccataagttttttaatatctctccccgggaagcgaaaaacatggatcctgagcaaagaatccttttagaagaaacttggcggtgcatcgaagattccggggtctctttgcgggatctccagcgtaaaaccacttctgtttttgcgggtattatgaattctgactaccggcagacaggtcatgaatcggaaatcgacagttacgcctgtttaggaagtttcgaagctatgctctccaaccggctttcatacacattcggtttgaccggaaaaagcatgtctgtaaatgccgcttgtgcatcgtcgcttgttgctttacatgaagcggttaagtcattgcggacaaaagaaagcgattatgcaattgcatcgggagtaaacttgaatttccaacccggaaaatatatttctttttctaaagccagaatgctgagtcctgacggcaaatgtaaaacctttgacgcagcggcgaacgggtacgttcccggagaaggggcaggcgttgtattgctgcagcgccttggtgatgcagtaaaagccggtcaccatatatacgggatcataaaagggacggctgttaatcatggcggtaaatcccgttccataaccgctcccagagcagaagcgcagtgccgggtcatctcagaagctttacacaacgctgctgttgatgctgcgacggtttcttatgtagaagcacatggtacaggtacatctctgggcgatccgatagaaatagaagcattgacaaaagcatatcggcaatatactgaggatactcaatattgcagaatcggaagtgtgaaaacaaatatcggtcatacagaagcagcggcgggaatggccggattgataaaagttctaatgatgatgaaacatcggagggtgccgaaaagcctgaatgtacatacggtaaatccaattatacagtttgaaaaaacaccgtttaggccggcgcttgattcaagtgattggaaggcggcagacggggctccgctcagggcgggaatcagctccttcggttttgggggtgttaactctcacgtcatcatcgaagaatttatacatacaaatgacgaaactgacagaaaggtaagggctcccttccttttttccgctaaaagtgaagaaagcatgaaacaaatgatacataattggagaaccttttctgacgattctgaggaattttgcaaaatatcaaatgaagcgatcagcagcacccttttaacaaggacatcgtttgattacagggcgggtttattggcaggcagcaaggaggaatttaaaaatcagcttaaagagggattaagttttcggaggaaacatgattctgaatgggcgcttgccatcggtgacttcaaatgggaaagttataaacaatttgccgttttgaaacgcgtgttccctgatctagaaaagaacgtaaggtcggtgctgaagggtataccagcattgcacagttcatttaaaagaaaatggacgcctgagaaaatccgcttgtattctttagttatcaatacggaaatcataaaaagtatcctggcatccggttttaagccaagtctcattacaggcgccggagacggatattacgtcgctcttgcagcagcggatatcatcaaaattgaaaaggccatttctgtcatcacaggcgctgaaaaaccttcgcacttatcctgcgagccgccgtccattccatttgtcaatccgtacacttcaaaaacgtacccgccggttcgattaaatgaagaatatgtaaggatgctgctgaacggtctgagcttcccggctgattttacagaccgcctgtacgggaaaacacggctgcttcttgagcaccaatatacgtttaaagggtttttagaagagtgggataaagcgggaaagactcaggaaatcgagattttatcttatattgtgaatcgcacggcggataaaagaaacgcattgccggctgaagaggaagcggcgatcatggctatccttgcctctatgagaagactgtataagagatgggatttaacagattatgatggattctttgataatgattatgttctggaaatattaaatttactggatgaaggaatcttgtctaaagaactttttctgagcatgttattgaaaaagcaagacggaattaaacaggctgttgcttgtatgaatgagcagccggcaggtttttatgataaggcccgttttccgctgatgacagaatacaatcagatggatgccgtgtttcaggagatagctgaccatatgccgcttcacacggaagaaaagggaacggagccggatgtgaatatctctgatttttcagtttttcaattcggatcgctccctccatcagcaaaactaaacaaagcggctgcttttgaagcggacaaaccagctgatgaggctctttatcattcatttatgcaaatgtggctttcaggagaagagattgaatgggcgaaactaggtgattatcataaaagaaaagccccgcttccgccttatccgtttgagcgctctcaattttctttaaaccctcagccggtaaaatcagacgcggctttttcagaaaagaagaatcaggcactttatacgccggtatggaaagaaaccgcacttgagaatgaagcgggcagcggacaagcctgtactattttgttgttctccgggaataaagactattttgaagagctgaaaaaaagagagaatacgtccgcatatcttattatgcccggtgaccgtttagagcagataagcgacagtgttttcaccatcaacaggcagtgtcccgaagattatcaaggtgtcattcgtctgttaaaggaaaaaggcgcagcgcccgatgcaattttgcatacttggtctgaaaaacagcctgaactggaagaaacactcgcatcaggaatttattctgtgttttatctgactaaggctttaatcagcgagaaccttataaacaaagtaacgttcatttatacattcagcgcagatcaaaaagaaaaattgccgtattttgaaggtgtgaacggttttttaaaatcggtaaaacaagagtacccgcagctgcattgtaagacggtttgctttgaacatgattctgcatccgtttcatgttcagagaaggctgacattctttataaagaaataaacacagcgcctgatcggcatattcatatcacttacagaggctgcgtaagatatgcacggatgttagagaagcagagagaaacaaacagaaagaccattcaataccctgaaaaagataaagtatatttaattacaggggatttggggggattggcagtaaaatcgctgaatattgcgcgaaaactgaaagatccaccattatcctatcggggcgatctgttttaaacggagataagcagaaacatttagaatacctgaacagctttaaagccaaggtttattatatacaggcgaatatatccgataaagaagcggtaaaaaaaatgattgacggtattaccgatcagcatgcaggtcttcatggcgtcattcattgtgcaggagttatcagagactcgctgctttttcgaaaaacaaagcatgaactttcagaggtgattgctccgaaagttcatggcgcattgaatcttgatcatgcaacgaagtcgctcgaattagattttttcgccgttttttcttcagtcgtctctattgcaggcaacgaaggtcagtgtgattatgcatatgcaaacggctttttagatcattttgccgaatatcgggaacagaaacggcaaaattctctgcgcagcggccgcaccctgacaatcaattggcctttatggcaagacatcggaatgggggcgaacctgtcaggtcaagggcggacgtctctttttcatggttcagggctcgaagaacttcctgctgaagacggaacgcaatggttttcgcggattgtaacttcgggtcagctgcataatattgcagtctgcggtgatcatgaacgctttgaacaatttatgcagcagagatttttgacggacgaaacagagacaggcagtgccgttcctttggctcaaggcgatattttggatcagacagttttgtttttaaccaatatcatctcctgtgaggtcggtgcagaacgggaagagatcgatcaagatgtgcatctggctgaatatggaatggattccgttatgattcatcaatgcaacacaaagctggagcagtcactgggagcaatttcgaaaacgcttttatttgaatttcatacaatcagagatttagcagatcatcttgtaaaagaatacccggatcggctgggacgtttattttcacgggaggaaaaaggaaaacagattcagagcattacccccgccaggccggaacaaaacaccactgcatctgcggcggaggaaaaagaacatcttgacgggatagcggtaatcggtatcagcggccgttatcccggggctgaaaatatcgaagaattgtgggatcttctatcaaaagagagaacctcaatcacagaaattccgaaagaacgatggaattatgagacctactatgatccagatcccgctaaagcgcatgaggggaaaatttattgcaaatggggcggatttttaaagaatgctgaatcatttgattctttgtttttccaaatatcgccgagagaagcagaagcgatggatcctcaggaacgaatatttctcgaaaccgtatggaaagcatttgaagattcgggatataccattgaagggttgagaaagcagaccgaaaaacatgtcggtgtatttgcgggagttacaaccaattcttacaagctgctcggcgaaagaataccgacggacaaaaacgatgtacttccaaattcgttcccgtggtctctcgcgaacagagtgtcttacacatttgattttacgggtcccagtatccctgtagatacggcttgctcttcatccttaacggcaattcacatggcttgccaaagtttaaaaaaaggtgagtgctcggttgcggttgcgggaggagtaaatttgtatcttcatccttctgactatttataccggtgtcagatgggaatgctttcaaaatcgggaaaatgcagaagttttggagaaggcggcgacggtttcgtgcccggagaaggtgtcggggccgttattcttaaaccgcttaaagatgccatacgtgataatgatactgtgtacgccgtcataaaaggaacggcaattaaccatggcggaaagacgaatggctatacggtgcctaatcctgccgcacaggcggatttaattcaaggagctcttaaagcggccggttggagcgccagaagtgtcagctttattgaagcacacggcacgggaacgccgctgggtgacccgattgaagtccgaggtctgaccaaggcgttcagagcttataccgaagatgtttcatattgctctctcggatcgattaaatctaacatcggtcatctcgaagcggccgcgggtattgccggcctgacaaagattattttacaaatgaagtataaaaaaatagccgcaacactgcatgctgaacgggtgcatccggatctttatctggaagagacacctttttgtctccagcaggaaactgccgactggataaaacccgcgaatgaaaaacattctgacagcaaatatccgcggcgtgcgggattaagttctttcggagcgggcggggcaaatgctcatattcttgtggaagagtatgagtctgctgctgactgtcaaacggggcgtgaggaaagtgaagaacttatcgtactctcagccaagcattcactgagtttacgggaatcagcaaaaaagctggaggaatatcttcaaaaggctcgtcataagcagggcgagtgtttacagccggcgggaacaaataagccgcttcacctttctgatattgcatatacccttcttgaagggcgggaagccatgccggaaaggcttgctgtcatttcgaaaaatatcgatgacctgatgttgaaattaaatcacttttataatggaattgacgatcacgaaatattcagagggaaaaaaccgaatcataaacgcggacagcggcaatcggatcttccgctcaattccggcagaaccacattagccgacatggctgaattctgggtatcgggagggagtttaagctgggaagatttccgcaccggcagaaaaccggcaaaaattgcgctgccgacttaccctttcttaaaaaacagactgtgggtgtcaaataaggcgcaaacaacatcagcagccggtacagctcctttatttgatttttctgccggtgagtgccgattttataaaacgctttcagattctgaatattatttaaaagaccatgttgtgcatgggaatatggttctgcccggagcggcaatcatcgaagcggccagagaagcgggagagaggctgtacggaaaatcagtcataaaactgagtcaggttgtatgggcggttccgataaccgttgaaaaagaaaagacgataatgatagatctgctgccgaatcaaaaagacggcagatttgtggtgaaaaccgatatgcaatctgaagcggcagttcattgccaaggaaacattatgacatgcggagataaagacgcctctcatacagagcattttaaattggacagctggttaaccggacagaaaagattaatcagcggcgctgagtgttatagaaacttccggcagagcggtttggactatggagccggctttcaggtaataaaacagctgcttatccatgaaaatgctgttcttgcacgaatatcacttcctgagagcattgataaaaaatccggcgggctgctggaaccgtgtttattggatggcatttttcaatccacaatcgggtttacgtccggtcaggaagacgatcataccgcatatttgccttttgaattaggtgagctggaaattcttcaaccaccttcggcaagcggctatgcttacattacagctgccgatgaaagacaacatgatgatgtcaaaaggtttcatatactatttatggatgaacacggatctgtaagtcttaaaataaaaaacttagcgttgaaggcattaagggctgcaccgcagactcaaaatgagcggcattcagctaagtattactctgatatgtggaagcgggcccctatgcttcatcagcctgaaggcagcggtttaaacagctgccttgtaatttcactccgtcaggatatatcagaaccgctgatccgccaggcatataaagatatcggcctgaacatgatctttgtccgccatggcggaagttttcaagaaaaagaagctgattcctttgaattgaacagcgtcaaacttgaaggctataagaaattgctggcgattcttaaagaaagacaagtgacaattgaccgcgtcattttaatcgggatgagccctgaaacgggaattgagcataacattcatgaaaagctggaagaggctgttttgccggttttcaatgtaacgaaagctctgttagcaacaatcccaagacataaaattctgatatcacatgtatttttcacaaggaacaatcaaatcttaccttatcaaatggcaatcagcggcttttttaggtcgcttcatttagaacatccaatgttgtccggtaaaaatattgaaatacacagcgatgaaattcagttacagctgaacaccggtctgcctgaattaaaaaaccttgtgaaagaaacagtcatcagcgatgatgcttcagagatcagatacagagatggaatcaggcaggtgaaacactctgcagaaattgaaagggcagagcccccaaaaagatggaagtaaaagaagggggagtttaccttattacaggaggaacaggcggcctgggcctgatttttgccagacatcttgtgcgaaaagggagaataaagcttgtgcttatcggcaggtcagagctttctgaggaagccgtaagcaatgtaaaagagctcgaaaaaaacggatcagaagttttttatgtaaaaaccgatatttctgataaggaaaatgtcaacaacctgataaaactcgtcaaaaacaaattaggtcctgttaaaggagttattcacagcgccggtgtgataaaagattcattactcatcaataagcgtgaagaggatctcgattcagtcctggccagcaaggtttacggaacgatatggcttgaccggtatacagacagagaacctctggacttttttgttatgttttcatctatcagcgcaataatcgggaatgccggacaaactgattatgcttatgcaaaccggtttatggattactttgcggaaatgagagcggcggaaaataaacctggaaaaacagtctcgattaattggcctttatggaaagaaggcggtatgcaaattgacattcattcagagaagttcctttatgaccgtttcggaatgctgcctctgggaaaacgggaaggccttgcagcatttgatcaagcaatgacagggtgtgaacatcaaataatggtatttagcggtaatgaattaaagctggaacgaatgataacgattgacagcggaaaaagtgacccggcaatcgccgacgaaaatcacgaaccgaaagagctgtcaataactgaatctttaaaaagcactttgacgcgcatcatcaccggcgtattaaaaattgaagaacgggaatttgattttgaactgccgataagtgaatacggatttgattcaattatgtttacaatgctgggcaacgaattaaacgaaacattaggaatatcaatgatgccgtcagattttttcggtcttactgattttaatgaacttcttgagtttttaaagagtgagtattccgaagagcttcatctctgcggatctttttcttcagatgaatctgcggcgaaagacaggagagaaaatctgattgagggcatcgcaaagatgatgtccagtattttaaagattgacagaaaggaaatggaagaagagacttcattcggcgagtacggatttgattctattacgtttaccagactcggaaatgaaatcaatcaacaatatggtacggaattattgccgtccattttctttgaatgcaattcactggctgaactgactgattatgtaatcgagcaatacggagaaatcctttttgctgagacagaacctttttctgcagcagacgaaaaaacattgtacagcacgcctccgccggaatcctatgaacattcccctgagcctgaaaacaaaaccaggcaagaggaaagacatatgaatgagccggttgcaatagtgggaataagcggccgtttcccccaaacagatacgctggaagacttttgggaaggaattgaaaaagggcgggatatgattacagacattcctgaagaccgttgggactggaaagagtttgacggcgatccgatcagggacgtcaatagaacaaaaataaaaaaaggcggatttatcaaaggcgcggacagttttgatccgttgtttttcgggatttctcccgccgaagcagaattaatggatccccagcaaagaatttttatggagactgtatggaaaacaatagaagatgcgggctataagccgtcagatctggcagggacgaaaaccgcggtgtttgcaggggtcgccacaacggactatgcggaacgtctcaatgaaaatggcgtctctgttcaggcgcagaccgcaaccggtttaaatcattgtatattggctaatcgtatttcttaccagctgaacctgacgggtccgagcgaaccgattgacactgcctgttcaagttcattagttgcactccatcgtgcggctgaggggattcaaagaggcgattttgaaatggcgattgcaggcggagtgcatattatgacaagccctactctgtttatagcttttgataaagcaggtatgctttccaaagacggaaagtgcaaaacgtttgataaaagcgctgacggctatgtaaggagtgaaggggcggctgcagtactgcttaagccgctcagcaaagcacaggcagacggtgatcatatttatggtttgattaaagggtcagctgtaaatcacggcggccgcgccaattctttgacagctccgaatccgaacgcacaggcggacttattaaccgaagcttggcggaaggcgggggtcagtcccgccactgcgggatatatagaagcgcatggcacagggacaagtcttggcgatccgattgaagtaaacagcatcataaaggcatttaaaacgttatatcaagaatgggacattccttttgagaaacagaaaagctgcggaatcgggtctgtgaaaacaaacatcggccatctcgaaaccgctgccggaatagccggagtgctgaaagtgttactggcttttaaatatcgcaaacttccgggactcgcccatttttcagaactcaatccatacatcaaaatggaaaatacgccattttatatcacagaaaccgctcaaaagtggaatccgataaaagatgaagagaacaacgatctgccgaggagagcaggtgtcagctcattcggattcggcggtgtgaacgcacatattgttttagaggaatatagggaacctcaaaaagaagtaccggaaaacaacggtaaaacacacatttttgttttatctgcgaaaaccaaagatcaattacttgagtatatccggcttatggttcagtacttggatcgcgtgattgccggtgacatgaccgttaatgccagtgacatggaatttacattgcaaaacggccgggaagcaatgaacgagagaattgccgtatgtgcagtgagtctgactgagctgagagataaatacgtcagctttcttgataaaagcaaggtgcaaaatggcgtatttataagcgaaaacactgaagagcgtgcagctgtttctgaatatatgattcaggaggctcttcaaagcggaaaggaggagctgctcgcacaatggtgggccaatggagccgagtttgaatggaagaccatcggcaatgagaaattgaatagagtgccgctgccgtcttatccgtttgcaaaagagagttattggtttactccgaaaaagaacaaaggcgaggttaatagcaaaagtcttcacccattaatcagcgagaatgtctcaacattaaagaaacaagcatttaaaactgttatttccggaactgaatttttcgtcactgatcaccttgtttcaggagactgtgtgttgccgggagccgcttcgcttgaaatggctctagtttgtgcggaaataagcggagaaagtaaagtatataaaataaaagacgtgatgtggaacagacctatattatataaaggaaaaacgctgcacatttataccggcttggaaatgaaacaagataagttgaacgcaacgatatgtaaagagggcccggatggcgtgcagcaaatctgcacacaatgtgaaacagtattcggagacataaacagcaatcctgagtatgtcgatattgatcagttcatacgcagcagtaaaacggtcataagccggaaagagtgttatcaccgcttcagtcgtatgggcctgacatatcagagcggttttcaaacgttgaaagccgtatatcgcggtgatgtggagttaatggcagaattggagcttccggatcatttagcgaacgggttttcacattttacactccatccttcattaattgacggcggttttcaagcggctgcatttttgttaagagaaaatgagaaagacggcttatttgttccttattcacttagagagcttcacattaagagggcgcttactgcccgatgccatgtttcggtgagagaaaccggtttttatacgtataacattgattttattaacgagagcggcgaagtagccgtgagcatgaaagacttctctgtcagaaaagtgaccgggggagaattaaccgcaggtcataaaaatgaagatcaggaaattctcttcttattggaacaattgaaaaacggtgaactttctgctgaccaagtttatcagctgctggagggaaaatagtgcagatcaaacaaatactttccttaattgaagaacagcaaatgtctcctgatgcaggactggagctaattcgtacttacagaaaacaacaaatggaaaaaaaggcggagccggaatcacaagctccgtccccaaccattttttttaagaccgattgggtcaggacaaatcacattgatatgccgaatcagcaggcaccggggaatatgctgatttttgatcaggataaccgtctttttcagcatgccgagatgatgaatggagaacataaccgtgtcattcttgtaacgcccgattctgattacagaattgaacggaatagatgcacaatcaatccttctgatgaacatcatgtcgaaatgctgctgtctgatttggctgaaaacggatttacacctgatgtcgtgctttatttatggaatagagaaatcagagaattcactgaagaatctgttaatgaatctcttcgcagagggataaactcgctctttttattatcaaaagctttaatgcgaagaaacgaacctgttacgttattgcatatttattggacaagcggtctgaatcagccgtttcatgaagctgtcggagggttcgtgaaaacggtaaacatggaaagctccaagcttaaagcgaaaaccatacagatacgccacgaggattctgacataaatcctccggtttccgagatgtgggatgctgcaatcagtgaaatgcagcgcattcaaacggatgaatgtgagattttaatagactcatatacccgttatgtgaaagggctgcagcctattgatattccggaacacgataacggatctgtaacgtatcaaaaaggcggcatatatatcattaccggaggagccggaaaactcgggctgctgtttgcggaacacatcgctaatgaaaatcaagccgtgattatacttacaggccgttcttttttaacagctgatcaaaaagaacggatcagtatgcttaatgagagcggctctattgttgaatatcagcggacggacataacagatcgaacagaggcagagcgattcattttcggcattaaacagcggtacggcagcataaacgggatcatccatgctgccggcatccttcgtgattcatttcttgtaaataaaagtcccggtgattttacggacgtactgaaaccgaaagtttacgggacaatctggctggatgagctgacaaaagacgaagatcttgatttttttgttctcttttcttctttttccgcttacggaaatgccggccaaagtgactatgcgtacgcaaatcattttatggacagttttgcaatgcttcgatcccagctctctcgaaacggaaaaacactatcaatcaattggccgttattgaaagatggcggaatgagtctcgacagcagtggaatcgttcaaataaaagaaaaatacggaatgactccgatgcgaacttcctctgttctggaagcgtttctgaaaatgctgcggtcttcatttaccagcttaatgcctgcagaaggtgagcgggataaaatgataaaggcgctttcgattcaaagaaatacagctgcagcagatcaagatacactcacggcggaacacgatgaagaagcggaatatgctgcgaaagaaaaagtcaatgactatttaatcaagatcatcagcggtgtcttgaaaatccaagctcataaaataaatgcgaaagactcttttgagaagttcggaatcaactcacttatgatcatgtcacttattgcaaagcttgaagatactttcggggatcttccgaaaacaatcttttttgaatatcagaacattgaagagctttcaaacttcttcctaacatcttttaaagaaaaagtgcttaaggccgcaggggcagctccggtaacaagagtacagaagaaaagagaaaatccgagtaaaaaacagcaccggcagcagaaggatacacctgcaccgagcatggatcagccgggggaggatattgccattatcggtgtgagcggaagatatccgaattccgatactcttgaggagttctgggaaaacattgccggagggaaaaactgtattattgaaatccccgaggaacgttgggatttcagatcgaattacagtcccgacagaatggagaaggggaaaatcaacagtaagtggggcggttttatcagcggtgttgatcaattcgatccgctgtttttccacatttctcataaagaagctgagctgatggaccctcaggagcgaatttttctcgaaacctcctggcatacgtttgaagattcaggatatacaaaagagaagcttaacggtatgaaagccggtgtatttgtcggagccatgtacggacaatatcaattattcggcgcagaagaaactgcgcggggcaatccgattgcgctcagttccttcttttcatctattgccaacagggtttcgtacttttttaatctctccggcccgagcattgcactggatacgatgtgttcatcatcgctgacggccattcacttggcatgtgagagcattaaaagaggggaaagtgaaattgcgcttgcaggcggcgttaatgtatccatacaccccagcaaatacctttggctgagtcaaggtaattttgtttccaccgaaggattgtgcagaagtttcggagagggcggagacggctatgtcccgggagaaggttcgggagccgttctgttgaaacctctggaaaaagcaattgctgatcaggatcatatatacggagtgattaaaggaacatctgtaaatcatggcggaaaaaccaatggatttacggttccgaatccgaatgcacaagctgagctgattgctgaaaatttcaagaaatcgggcatcagtccgcgatccgtcagctacttggaagcacacggaacgggtacctcgctcggagatccgattgagatcgcaggattgacaaaagcttttgagaaatttacggatgataaacaattttgtgccataggttcagtgaagtctaatatcggacatttggagtctgccgcaggtatagcagcccttacaaaagttcttttacaatttaagcatcagaagttggcgccatccattcactcggaacagctgaaccaaaatatccgatttgaaaagacgcctttttacgttcagcagaaagaagaagagtggcggaaagaatcaggcgcctctaacaggagagcagcaatcagttcgttcggagcgggaggagcaaatgcccatgtcattgtggaggaatatcaaaaccatgcggacacacaaacaataagcggtccgtttgccgcagttctttctgccaaaaatgaagacagactgaaagaatacgcccggcgccttctgcaattcacagagcgggagacaacagcctcggcagctgatatcgcttttacattgcagacatgcagggagcctatggaagacagacttgctgttgtagcttccgatttgccggaacttaaggagaagctgagaactttctgtactgaaggaacaattggagagggcgtatacaaaggcaatgttacaaaagattttgataaagtctttatctttcatgatcaaaagatgaaagataaattcctcgaagtgatgatggagacaaaggacttgaatcttctagcaaaattatggtctttcggggctgatattcaatggagagagttatatgaagagtataccccgcaaaaggtcaagcttcctttatatccatttgctgaggagtcttactgggtgcctcgaaatcaaagcgcaatatttccggaaatattgccgcagcagtcttcactgcacccgcttctggattcgaatgaatctactctggaacagcagttttttaaaacgacattaagagaaaaagagatttggttaaaagaccacatcgtaaaaaacaagagcattctcccggcagctgcttttcttgaaatggcatgcgcagcgggaacgcggtcatatcgaaagaaagaggtcactcgtttaaaaaacgtgatctttgcaagaccggccatgcttttgcaagagagtctgaccatttacactcacatttccgtaaaagacggcaaaatattatttaatatgtcatctgacgaggatgctgctgtaaggactggatttgtgacgggggaattagattatgatcatcattacggtgatgatgatatagagaatatcgacagacaagagatgataaacagaagtgcttttgtccgtgaacaagatgaatgttacaagtattttcgggaaaacgggttcctgtatgggcgcgcttttcagccgattcaacgtttatggggcggaaaaacagaagcggttgcacacttattgctgccaaaagaagccgcatatgctcttgaaaattatacattgcatccgtctttaattgatggggctctgcaatctttgttcgggattacggacggaagagaagaggcatctgtttatgttcctttttcaataggagagattacgattcggaaaaaagtttcagcagaatgctgggcatatgcgcgtaaaacaggccaaaaaggtcaatccgagcttatttacgatattcagctgcttaatgaacaaggagaaagacttgcaggtttgaaggatgtaaccattcgtaaaaaagaaacgttttccgcggaggcacagactcgtgcaacagcggattccaatggaaagaacgagagagtaaaagagcttctcagacaattaaaagcgggcgaactgactgccgaagaagcagattatgcgctggagcatatgcaggattagtttatcattttgcggcagtgccatttgtaaaggggatgaagatttttatgaaagaagcccgtcatattagaaaaaaagtactttctgacatagaaagcggcatcatttctttggaagaaggagtaaagcggatacagcagcttggttctcattccgcagggggtaacggacaggcgatatattatcagacggtctggcagcggacagatctcagcatacatgtaaaaggcggccggcgtgagggcagccttttattatttgataaaaatgaagatgtgagtaaagaacttgctgcattgcatgatacaagggttattttggttaagccggggaaagagtttcgaaaaaccggggacggtgtatttgaaatcgacccccgctctgaaaaagattacataaacctgttaggatggcttatagaagaagagaagtcagatatacgggaagcggtgcatttatggtcagacatgccgtttgaaaaaacagagagagcaattcgtgaacaatgcgacagcggagtctattctttgtttttattacaacaggcgctcttcaaaaataactgccgcaaaccgatcaagctgttatatggatatttttcgcatctttccggagaacagcctctttacgcggcggcaagcggatttttgcggacattacagctggaaaatccgttaatctcagcaaaaagcattgaaatggagcagtcaatagcagccgttcacgcagctgatatcatacgcaatgagctgagtgatttccagccttcagatgtagagatccgttataaagacatgcagcgttatgtcaaacagctcaaaacgtatgaacccgaaaaaaattccggaagcggagctgtgccgctgagagaaaatggagtatatattatcgcgggcggcgcgggcggattaggatttacctttgcagaatatttggcttttcaaacaaaatgctgccttgttttaacaggtagatctccgctttcagatcatataagaaaacagctgaggcgattggaggatgccggttcttcagctgtttatgttcaggctgatattaccaataaggaagaagccgaatatgtagtcaaaaaagccaaaacttcttatggaaaagtaaacggggtcattcagggcgcgggaatcatccgggattctttccttcttaacaagtcacgagaggaattcgatcaggtaatcagaccgaaagtattgggtacgatgtggctgaatgatgctgttgagaaagaaaatcctgactttttcatttgcttctcctctacttccgcagtgttgggaaatgtcgggcaatctgattacgcgttcggaaacagttatatggatcattttatgaatatgcgttctgcccagcattctgatacgatttctctctctctgaactggccgctgtggaaagaagtcggcatgcaagtggatgagcgaacggtagagacaatgaaaaaggcgggtttttatcctttagaaaaagaagaaggtaaaaaagcgtttgccgtcgcattgtcctccggtttttcgcaattcactgtattttacggagatgagcaaattgacaatcatgttcatcaattatatgaacgaaaagacaatattcaggcagatgaaggaacagggagaaatatcgaatcatttgattcagagaaactgacagctgaaacatctgattttatcataaaaataattgctgcagaattcaggatgcctgcggacaaaatagatgcagaagaggcattggaaaaatacggacttgattccgttatgattatcaatatgacgaatgagcttgaaaaacatttcggcgcgctctcaaaaacgctgttattcgaatatcagactgcggcagaattgtcacagtatttcgttgaggagcacagggatactcttcttcataaactccggttaggagaaaacgggagcggcactccatctcagaagaaaaaagataataaacagacagccgatgttaacgggaaacagaaaatccagatgaaaaatcaggtgcagcaggagaagtatcatgacaatgatatcgctattatcggtatcagcggacgttacccgatggcaaatgatcttgatactctgtgggaaaacttattgaacggtaaagactgtataactgagatacctgaggatcggtgggattcgaggctgcactatcagcctgcggcgggcgacgaagtaaaaaaccaaagcaaatggggggatttattgacgatgtgtatcattttgatccgttgttctttaatatttctcctgccgaagctgaattaattgatccgcaggagagactgtttttagagacggtttggcacaccatagaagatgccgggtacgcaaagaaaacgcttgaaagaaaaaacgtcggtgtttttgcaggggttatgtacggccaatatcagctgtacagcgttggtcacgaagcggccgtttcttcctcatttgcatcaatcgcaaaccgggtatcctacttctttaatttcagcgggccaagtattgctttggacacgatgtgttcctcatcattaacggctgttcattttgcctgtgaaagtttaatcaggaatgaatgtgaaattgcaattgcaggaggcgtcaatttatccattcatcctcataaatatgaactcctgactcaaggaggatttttatccagtgatggccggtgcagaagcttcggttcaggaggagacggctatgtgccgggagaagggacaggtgccgtgctgctgaaacccgtaaaaaaggctattgccgacggtgatcagatttattcagttattaaggcaacagcgatcaaccacggtgctaagacgaatggatataccgtgccgaatccaaaagctcaaagtgaggtcattacgagagccttaaaaaaaggatgtattgatcccaaaagcatcagctatatagaagctcacggaacaggcaccgcgttaggagatccgattgaaatcaccggcctgaccaaagcattttcaggtgccgaacgcgataagaagacatgcgcgatcgggtcggttaaatcaaatatcggacatcttgaggctgctgcaggcatagcgggcattacgaaagttattcttcaaatgaaacataaaacgattgttccgtcactgactcattctgctgaattgaatgagaatataccgtttcaaaaaacacctttttatgtaccggacagagccgaaaaatgggagtcatccgttcccaggcgtgccggaatcagttctttcggggcaggaggagctaatgcccatgttattttagaagaatttgcggatgaagctatctctcctctcgcggctgaagaacctgaacagcttttatttgttttttctgcaaaaaatgccgacaggctggcagaatatgcaaaacgcgcaaaagaacaaatagcagccagagattattcattagaaacacttagaaatacagcatttactttacaaaccgggagagaagaaatgccgcacagattggctgttatcgcctccacaagagatgaattgcttaaagggctgacagactatactctcggaaatgcgagggatcatatttttacaagcggcaaagacacaacagaagctcaaaggacgaacaaagctgaaattgaagaatcagccgcaaacagggatcttgtgaagattgctgaatactgggttggcggtaatggagtagattggctgtcactttataaagatgtcactttgagacgggtatcagcaccgggatatccatttgccaaagagctatgcagaatagatgcgcaaaatacgggaagccgccggatgaacgtaaataacgatctgcatccttacatttcatgcaatatatctgattttaaagcccagaagtttcttatcaatgtaagcgataccggtttgtatataaaaacaaagtatcaagacaaggaaatgtttccgtttctcagccagattgaaatggcgagagctgccggagcgatggcttcagggaatccgattattaaattaactgagctctcctttagagaaccgatgttacaaagcggaagcaatgagcagatccggattgtattaaccccggataatcagggtgcatcgtattctatagaaaaacagagcgacttatccatttattcctcagggcggctcgaattagaaggcggggcgtacgagaacggaaatattcatcttgagccgttcctgtctcagggcgcagaccgtataccgtacgaagcgttttatcagcggcttgccgaattcggatacagctgcagtgacagtctgaaagccgcagagcactgcgtcagcaggaacggacaggtgcttttaaagataaaagcaaaggccgggccgaaagggtgcataatcaaaccggaagtgattgagagcgcatatcaagccgtcgtataccttgcgggggaaaatgccggagagaccccggaaaatattaaagaatgtacgatttttgatcatgagactgaacccgtttatgtatatgcagaacaaactgaagaaagcgattcggcttatgatgtgtatgtattagacaatgccggcgggattttgatggaactgagcgggctggtttttggcgaaaagcctaataaaaatgtacgtttttatgagcatgagtgggatcaaaaaaaccctctgattgaaatgaaagatagggagccaaaaacaattctggtctttgcaaaagatgaagcgttggctgaagctctgaaaaatcaatcagacagccgtgtcattctcgtcacgccggatcagcggcagaccgatcaaaatctgctgacattctgtataaacccggaagtgacgtcagattatattcgtttattcgaagaattggagaaaaaagggttttctcctgatgtcatcttgcacacgggagaaacattttacgcgggtgaccgccttctcagcggcctggaatcaattttttatttattaaaagccctgagcgcccgcagtgacgcctctctttatcttcattctctgcttcttgttcactcttttaaaaaaggcatgaatgatccgtatacgggcgctcttgcaggctgtttaaaaacggcaaatatgttggtgccatccgcagagaatgtgaagtcaatcggtttttcagaacgtatatcaattgaaaaaatggctgaattttgtcttaacgaaatggtttcaggcgtggaacggcaggcggaagaagttaaatatataaatgacaagaggtatgttaagacattaaaggagtatgtattcaatcatacagagcactctcatcagctgaaacagaaagggatttacctcataacgggcggtttgggcggtctgggcctgatttttgcaaaatatttagcctctcagtatcaagcaaaattagtattgacgggaagatcaccgttaacagctgataaacgacataacattgaccggctgcaggcgcttggaggagacgcggtatattatcaagctgatgccgcagatcaaaagacgatgggatgggtcatagaagaaacgaaacggacttggggatccattcaaggcgttattcattcagctggtcatgccgatgatcggttatttacagagatgaatctgactgattttacggaaggcatgactgctaaaattgaaggaacggtatgcttagatgaattaacgaaagatgagccgcttgatttctttatcgtattttcttctatttcttcggtcttcggagattttggacaggttaactatgcgttgggcaattattttcaagatcaatatataaattggagatccgaacagagccgcaggcaagagagacaaggcaagagcatttcgattaactggccgttgtggcgtaaaggcggaatgcatttaaacaaagaagctgaagacgcatatctttccgcatccgggtttgattatttggaaacggaagaagggatagcggcttttgagacaattttggcaagtgactgtccgcaaatttcggttgttaccggggatgccggaacaacaccagcaaaaaaagatctgccgcatcaaaaagtaaatacgcttccggttcgtcaagaggaaagttcttatagaggaccgggttctgcagacaatgtccttgaagaactgaaacaaatggtgtcggaattattgaaaattaacattgaacagctggatacggcagagaatttcggcaatctcggctttgattctatcagtttgaaaacattagctgtcagactgaataaaaaatacaagcttaagctgacacctgccgttttctttacttacagccatataaagtctctttcagaattcctaaacagtgaactgcgtactgttgcaaaagggaatacaggtgcagaaaaaaatatttctgaaaaaaggaaagtgcacgccgggaaaaccgcagggaaaaccgtgaagccgccgcgaagttttccgtttgaaaaaaagacagcaagacaggctgaccatcatccggagaagcagccggttgccattatcgggatgagttgtgtttttccgggagcaaaaaatgcagatgagttttggatcaatttaatcaatgaaaaagattcgattcaggaaattcccccggatcgatgggattggaaaaaatacgccgaaggcaaaggaagcagcgaagtacattcgaaatggggcggatttatcacagatgccgataaatttgatgaggcgtttttcaatattaatccgcgggaagcagaactcatggatcctcagcacagaatttatttgcaggaaacctggaaagcgatagaagatgcgggttacaaagcttcaaagctgtccggcaaacatatcggggtgtttacgggcattcaatttaatgattaccgccagctgctgatgaggcattcggacggggcgcatgcgtttgcgggaaccggaaacagccaggcgctcatcagcaatcgtgtatcccactattttaatttcagaggtccgagtgagtccattgatacagcctgctcaagcagtcttgtagcaatccacagagctgtgcgctcgattcaaaatggcgaaagtgagctggcggtagcaggcggggtttcgctgctcttagatccagtcacgcatatgtataccgataaactcggtattttgtctagggacggccggtgtaagacgtttgataaacttgccgacggttatgtccgcggtgaaggtgcagctgttctgttattgaaaccattgcaagcggcaatgaatgacagagacaatatttacggagtcctgagaggaaccggagaaaatcacggaggaagatctgcttcattgaccgctccgaacccggaagctcaggcagaactaataacgtctgtttacaaaaatgccgatattcctgttgatacgatatcttatattgaagcacacggaaccggaacagaactgggagatccgattgagattgaaggcttgaaaaaagcgtttggatcttttgagccgcatccaggaaagaatcatgaccaatattgcggcatcggttcagtaaaaacgaatatcggtcatttagagcccgcctctggaatgccggggctgattaaagtattactatccatgaagtataaaacattgcctgccacacttcatgttaaggagctgaacccttacattcaattaagcggaacaccgtttcatattgtcaataaaactatgaagtgggccagattaaaagatcgaaaaggaaatgaaattccgcgccgcgccggagtcagttcctttggattcggcggggcaaatgctcatgtcatcgtggaagaatttgaatacggacaagataaagcagtaactgccgagcgggatcaaatcattgttctatcggccaaaacaaaggaaaggctgatggttaaagccaaagagttaacagcgtttttacatgaagaactatcagttcaattcagtcagcaagaggtgcaggaacgtgatgtgcaagaggcggttcgggaagcggcagcgggtatcctgcgtttagataccgcaaatatagatgcaaagacacctctttcggaattcggatttgatccgttggcttattccgaattaatctcttatataaaccaaatgtacggcacagaaatatcactagatatatttcaggaattaatgaccctgagtgagctgtgccgctatatcagcagcgtctggaatcgatcagctgataaaccgtataacggcaattttagagaaaagtccggaatcggtcttgaagaaatagcatatacgctgcaaaccggaagggaaccatttgaatgccgccttgcgatcacttgctcgaataccggagatcttcttgaaaaattaaacggttacattcaggggagcagactgcaaggtgtttatgaaggaaatgtaacggattttgatagtctgtacgctcctttattcggcggccccgaaggtcatgcatatgttcaatcactgattcagcaaaacaagccggccaaactggctcagttgtggacgatcggttgtgaaatcagctgggaagacttgtatgaggaggaactcaaaccggttaaacggcctcttcctctttatcctttcagtaagaacagacattggattcatttaaataaagatgaagcgcagaagattgaggctttctcgaacactgagcttcacaattcaaataaagatacagcagatggagaaatcatgtcgcttcttgaaaaagcacaaacaggtgagatgaatacgaaagagacgtcagagctgatagaggagttgcttttccatgaatgaaaaaacgatgcaaattgagcaaatcgtgaaaaaggtgaaagaaggcagcctgacgcgtgaagaagggctggaattaattaagagtttggggaaaacccatctatatgaaatggtatgggatagacatgaatttaaaggcagtgaaaaattcccgaatacgaaagagccaattttatttttttgcaaagacgacagcatgtataccgtaatgaagagacagcttgaaggctatgaggcgcctttcatttacgtgacttccggcgagcgtttcgaagattgccggaacggtcgttttaaaatgaactttgcaaatgatgaggattatgatgcgctatgcggggttctgcgttctcaaaatataagaccccgccatattattcattttttagctgccgggctcttcaaaaatacagaagatgcaataagaaagcagctcaataaaagtctgttttccttgtttcaaatgtttcaggccttcatggcgaacaaactttgtccgaaagcagaagttttgtttctgtatgaaaatgccgagggcgaggttcagcccatttataacgcggttgaaagttttcttaagaccgtacaggccgaaaatccgaatttcacatgtaaggctgcagagctgaaatcaatgtttgacgagccgtttacaaagcagcatattgcagatgtcatctcttttgaatggaacaatcaatgcaagacggaccactttacctgttatgagccgaggcattattataaaaggcagcttaaaagagtaaaaaaagaagatggggagaaacatagtttcagtgtaaaaaagaacggtgtgtatttaattacgggaggagccggaggcctcgggtatctgtttgcggaatatctggcgaaacaggcggaagtcaagctggtattaaccgggcgttctccggcatcccgtgaaacggcgcaaaaattgagcgcgcttgaaaatctcggtgctgaagccttatatgtcccggcagatatttcaaaggaaaaagaggcggacgcgttaattaagcacattaagcagacattcggagaattaaacggaattttgcacagtgccggacttgttaaggatgcatttatcataaaaaaagcgaaagaaagcatagaagaagttatagcgcctaaagtattcggaaccgtttggctggataaagcagctgaagaagagcctcttgatttcttcgttatgttttcatccctttcggccgttctgcctaatgcgggtcagagcgactacgccttcgctaacggatgtatggacggattcacccagtatcgaagcattaagggacgtcccgggaaaacactttctattaattggcctttatgggatgcggggaatatgacagttggtccggcagagctgcaggctttaagacacacggggctggaacttttatctgcccaagcagggcttgccgcttttcaggacagtatgagccgttctgcttctcagctggctgttatcagcggagacaaagatagaataagtgaattactctcaactgaccataaaaagatagagactgtgcctgaaaacaacagtctgccgcaattaaatgaaaaagatctgaaaaagcaaacgatccgtctattgacagagatcgtcggtgcggaaacgggaagaccggcggacagcattttacccgaggatacatttgaccgttacggaattgattctctaacaattttaggtcttaactcccgtctcgaaaagtattttggaagagtgtctaagactcttttctttgaatacagcagtgttgaagagctgtcagagtattttcttgaacactatcaacatgagttgaagaaggcgtttttaccggcagccgaacagcgaattgatcattcggcgccggcgaaacgggagaagctttccgtttcccgcataccatccgcaccttccgaggaagatattgcaattatcggtatagccggccgctacccgatggcgaaggatgtggaacagttttgggaaaatatttcttccggaaaagattgtataacggaaataccgaaagagcgctgggattttcggaaatattatcacacaggtgacaatgcccgtcatgatagcaaatggggaggttttataaaagacgctgataaattcgatccgctgttcttctcaatttcgcctcgtgatgccgagttaattgatcctcaggaacggttatttttagagacagcatggcacacgtttgaagatgcgggttacacaaagaaaaagttgaaacggcataagacaggggtatttgtcggcgtcacctacagccactatcagttatttgcagccggtgcttcagatgatgagggacgtcaggcgctcttgtcttcttattcgtctatcgcaaaccgggtgtcatatttctttgacctgcacggacccagccttgcaattgatacaatgtgttcttcttcactttctgctgttcattttgcatgtgaaagtttaaaaaggggagaatccaccctcgccatagccggaggagtgaatttatccttacacccggataaatatactttactttcacaaaatcattttgtttcaagcgatgggcgctgcagaagctttggagcgggaggagacggatatgtgccgggagaaggagtcggggccgttcttttgaaatcgctttctgccgcaaaggctgacggggacaggatttacggtgtgattaagggaacatctgtaaatcacggcggaaaaacaaatggatacactgtgccaaatccgggcgagcaggcaaacgtcatcagtgaaactcttgataaggcggggattgatgcagacagcataagttatattgaagcgcatggcacagggacatctttgggagacccgattgaaatttcaggtttaaccaaagctttgcacagctcgaaaagcgattatcgttgtgcaattggttcggttaagtcaaatatcggacacctagaggccgcggcgggaattgcttctatcacaaaagtgctgatgcaaatgaagtataaacagcttgctccttcccttcattccgataacttaaatcctaatattgattttgaggaaacaccgttttacgtgcagtctgaattgaccgattgggagacgccgcaaaatcaagccagaaggtcgggtatcagttctttcggcgctggaggatctaatgcccacattatcatcgaagagtacaagaatgaagaaaagatggaaacggtacagagcaacaagacgcaaattattctgctttctgccaaaaatgaagaacggctcagactcttgattgatgcatatataaaagaactggagccaaaaacgtcactagctgatgccgcgtacacttcgcagaccgggagaaacgctatggaagagcggctcgctgttgaggttagcagccttgacgatcttcgcgataagctgacgatgtatttgcggtcagatcataagttaaacggtttatataggggaaacgcccgccgaggcgccggtcaaaagaatgccctgtcagccgctcactttgaaaatgcaagagatatggccattcactgggtgaacggaggagacgttgaatgggaagagatgtacactgcggaattaccgaagcttatttctcttcctgcatacccttttgaacggaacagatattgggtgcctgccgcaaaagcagcacagaaacagaaaacaggtgtaccgcagagtctgccccatgcaccgactgacttatcatttgatgtattaaaaaaatcgtggaaaaaacaaaaggctgcgccttccgcttttacgaaaggacaggtgatgatcctggctaatagtgaaagtgagcggcttgcattcgaattgtttgattcagatcctctgattgaacccgctgtcatttgcgcagataactgggatcattcggatggggaagccaaaaaaacggctctagcagtcatagaagaaaatccggaaatcatcggcatgattgacctgtcagatttgcggagtaatcaaaacggggcacgcaccggcacaatcgggaagctgacactgctgcaggaaatcataaagacacgtaaaaagcttttcgttttacatgtgacaagagggctgcagacacttctgaatgacaagccgtcgttagccggagccgaaacagccggactatataaaatgctgagcgcggagtatcaaaagataaaatcaaaaacaatagatgtagacgggcatgtcgggactgcggcggaactgagacaggtaatcacagatgaagcttgcgctgacgggctgtatagtgaaatctgctaccggaacggtgatcgttatattccatacgtcgagaaattaaatgcggcggaaataaaccggaacctatccggtctgccggtatgccgtacggatcaaaccttggttattacagggggaacaagagggatcggagcagaacttgccagacattatgccggcaagggagtcaaaaaacttgtgctgatgggagtaaccgaccttccggaatctgataaaatagccggcatgttagaagacaccgatgaaaagtcacctctttattcgaaattacaactgctgcatgagttggatcaaaagggagttcaggtggaagtgtattccgggccgctcacggaaaaagaaaaattacatcgcttcttttcagaggtgcgaatgaagttcggcaaaatcggcggggtgattcattgcgctggtgcagccaatcattcgaatccggcttttattcataaatctgatcaagaaataagagaagtatttgagccaaaggtgcaggggatgcaagtacttcatgacgtttttattgatgacgaacttgatttcttcattttgttttcatctgttgcgagcgcttttcctttattaggcgccggaacaagtgactatgccgcggctaacgcttttatggattactttgcggcgtatcagcatgcagccggcaaaacatattatcaatcaattaactggccgagctggaaggacattgggatgggcgaggtgacaagtccatcatatcaggcactcggtttactttcacactcaacagaaacaggtatttccatgctggatgaaatcatgacgataaacggatatccatgccttataccggcaaagacacatccggagaaattcaagctgaagcagctgcttcagacaagaattcaagcggctaaaaataacccggatgctgaggaaaaagtgatctctggtcatggtgacaatgaagctatgatcaggaagttaatggagattttttccgcggagctgaaaataccttacgggaatttagatcaggatacgtcttttgcggattacggagttgattcaatcttactggttcagcttgtcaaaaaagcggaagatgcatttcaaataaaaattgaaccttcggcttttctggagtatccgagtttttcacaactgggcgtctatttgaacgagttatttgcaagtgaggggatcagtcctcaaattgattcagaaaatattgaggttcggaataaagagcaacatataaatcaaaatgcttccgaagtacgggacagcggatctcaaatgcaaccaaccagtctgaatcaaatcgctattatcggaatgggctgtgagtttccggatgctccggacacagaaacattctggagaaatttgaagaaaggacaacatagtgtccgtgaagtcccggcgtcgcgatgggatatttcttcatactactctgacacctatgaaaaaggaaaaagtatcagtaagtggggcggatttcttcaagatattgagtctttcgatcccgcgttttttaatatgaacaaaagtgaggcatcagagcttgatccgttaatcaaaaaatgccttgaggtcagcgtccagacattgagagacggcggctatacaaaggaagaagtatcaaacaaagaagtcggcgttttcatcggttcgcgcaccgggacgtttatgtccaaaataggttccccttcaaaaaatacgatcgtgggtataggacaaaatttcataggcgcgcatatctcacacttttttaatctgaaaggaccgaatctggttgtagacacggcttgttcttcttcattggtcagcgtccatctcgcttgtcaaagcctgatgtcaaaagagtcagatatggcaattgcgggcggggttgacattttgctggatcaaaagccttacgtcatgctgagtgaggctcgggcgctttcacctgaaggaaaatgtcatacatttgatgagaaggcagatggatttgtaccgggagaaggatgcggcgcagtccttttgaaaagacttgatgacgcccttgccgaaggtgacagaatttacgcggtaattgactcctccgcggttaataatgacggacagacaatggggatgacaacacctaatccgaaagcgcaaagcgcagtgataaaaaaagccctgaaaaaggcggaatagatgcagatactctcagttatgtcgaaacgcatggcaccggtacgatgataggagatccgattgaattaaaagcgctgactgaagtgttccgggaggttacggaagaaacgcaattttgcggagtaggcagcgtaaaaacgaatttcggacatttaatgagcgcagcggggatagcgagtattataaaggttgccttatccataaaaaatcagatgctcccgccgacactacattgtaaaacgccaaatccgcgttttaaatttgatcagtcgcctttctttccgaacacgtctttaaaagaatggcgtcccagaaaagggattttgagagccggaatcagttcttttggattcgggggcacgaacgcacatatgatattgagcgacagccatctcacgttaggatatggagagacaaaaagacacccgctttctccggttatattcaataaggaacaatgctggatcgacaatggagaagctccagaaaaggaagagtcagaattgctgattcctttacttgatttcaaagaattataaagaaaagaaaaggaatgagacaggtggccagtaatcaaaactatcagttcacattaacaattaaacatacggactatattgtcagggatcaccgggtgcatggcacccggattatacccggtgtcacatttttagatatgatataccgtatggcgctgagtaaaggtttgcctattgaagaactcgagtgtcagaatattttgtatttggaacctgtagcaacatcggacacctttgacagagaaatccgcatccgttttcagggattggaacagggatgggaaatccaggcgaagagcagaaaggtaaaagatgaccggattctggatgaaagctgggatgagaatatgaactgcaggctcatgcagaaattcccggaaagcatgagttcaattcatatcgatgaaatcaaacatgcctccgtccgtgaagccgatatggagatatgctatgactatttaaaaaaggttgatatagagcattttgaatttatgaagagtctggggaaggtttatgcgtctgatcattctgtacttgcagagttgtcgctcagccaaattgccaaacaatataccggctattttcaattgcatcccacttttcttgatgcgtctaccatcatatcgatcctttatcaggcatgtcccgaatattttacacaaggatctccggcaagccggatgaaaacgtatattcccattcatattgaatctttccgtatgacgaagcgcctggaagacaggtgttatgtgtacatagagaagcaagaccaaaatcatgattcaggggatgtcatccaagtcagttacggtttgtacgatgcacacggggagatgatcgcttattttacacggctgtctgtgaaacatattcgctcaaaagatttaattgaaaatctgaagcagactcgtttagaaactgaagcggcttctcagccaaaagacggcctgatgagaaaagattcaatcatagatcgaagcgaaagcattgagacacaccttaaagaattaatatccggggtttcaaatatagatctgcgtgacataaggacagacattggtttttatgaacaaggcctggattccgcttctttgcttgccattgtcaaagaacttgaaaacaaaacaggggaacagctgtatcctacactcctgtttgagcagaaaacgatccgggaactcgccgcgtatattaaagaaaatcaaaaaatgtccagttatttcttaacgcaaaatcaaccggctgaaaagcctgacatgaaagaaagtaagaacgaaaatctttccgctcttataacagaaggagacattcagcagctgatcgcagacatcaaagggactgcccctgaaacactctctgtggtaaaaggtttttatgaacaaggcctggattccgtcacacttatgcaagccgtaaaggcattggaggagaaaacaggcagggaactgtaccctactttattgtttgagtatccgacgattcaaaaacttgcaaattattttgcggagagcggcgaaaagacttccgttgacaaagacctccctctacatcatggagagaatcatacggctctgacctatttaacgccgtattggagacaaaaggctgccgcttgggacccgcattgcggaaataaaaagaaaagaacatgtctgctgtttcaatatgacagagagctttttcattttatgcgggaaaatgctgaaaatggattcgaaaatacacagatcattctcgttttatcagggaatcgtttctcctatcacggagacggaatttatgagatagatcacagggaggaagcccactttgacaggcttgcagctgatctgaaaaaaagggggcaaatgcccgacaccgtggtgtacgggtggccggaaggatcatttgccggcccggaaaaaataagtgaacagctttctaaaggggcttacccgctattctttttcagccgggcattgatgcgcagcaaggcggaaaaaaaggttgtatcgcttttcctttatccggcggaccataaaaatgatcagccgctttacgcttcagtccatggcgcagggcagtctattttgcttgagaacccgaaactggcccttaagacaatcgggatatcagtttcagacaagacatcgttgccggctcttacagctgaaatcatcagatgcgaatcaactgaagcgcatccgggagaaaccgatctttattatgaaggaaatgtgcgctgggtccgtgccttacgggaagcagaaccggctcaaaactcagatttctcctttaaagaaaacggagtatacatgattacaggaggggccggcggcttaggccttatatttgcagaacatatcgcagcgcaaacgaaagccaatattattttagcgggccgttctgaactgacggaagacaaaaagaacaaaatcagccgaatgaaagcaggcggttcttccgttcaatatataagaggagatttttcagatagccgcgatgcagagcgaatcataaaaactattaaaaggaaattcggagaaatcaacggtgtgatacacagtgccggtgtgacgcacgacgctttattgattcaaaaatcaaaagatgaaattcaggaagtgatcgctccgaaaataaatgggacggtcttattggacagcttgctgcaaaccgaacctttggacttctttgtgatgttttcatcaagcagctcgatgtacgggaatatcggacagacggattatgcattggctaaccggttcatcgatctttttgctgagtggcgtgaaggaatgaggcggaaaaaagaacgctccggcgtctcagtagccatcggctggcccctatgggaagacggcggcatgaaagtggataaacaaactgaaaaatggatgaaacaaaaaatcggtatggttccccttagtaaaaccaatgggatcaaagcttttcaagattcactctctatgaacgcatcacagctgatcgtgtttgaaggtgacaaagaaaaattggaatctgcacttcaagataccttcaaggaggatgaaagccgtgagatccaaataaatgaaacagctgatacaaggcatcaagacattgccattatcggtttaagcggaaagtatccgatggctgaagacttacctgaattttgggagaatttaaagagcggaaaagattgtattacagaaatcccgcctgaccgctggaatatagatgatttcttcagcgaagacagagatatgaaagggaagtcttacagcaagtggggaggttttatcagcggagccgatcaatttgatccgcttttctttcatatttccccaagggaagcagaacttatggatccccaggaaagactctttttagaaacggccaaaaattgttttgaagactcagggtacccgagaaacatgctggaaaagatgaaagtcggtgtatttgtcggtgcaatgtggggccaatatcaactatttgaaggagaagaaaatggagcggctttttcgccggcttccgtctattcttcaattgccaatcgggtgtcttattattttcatttaaaaggtccgagtttggctctggatacaatgtgctcttcatcattgacctctattcattacgcatgccaaagcatacattgcggagagagcgatatggcattagccggcggagtgaatttgtcaatacatccgaataaatataagttcctcagcatgggacagtttctatcaagtgacggcagatgccggagttttggaaaagacggaagcggttacgttcccggtgagggagtcggagccgtattgttaaaaccattgaaaaaagcaatagaagatcaagatcaaatatacggcgtgattaagggaagcgccgttaaccatggaggaaagacgagcgggtattccataccgaatccggatgcgcaggcggaggtcatttcagaagcgcttcgtaaagctgacattgatccgaacaccgtcaattatattgaagcgcatggaacagggacatcattaggcgatccgattgaaattcaaggactgaaagattcctatcaattgaaccatccttgcgccatcggttcggtgaaatccaatatcggacatttagaatctgcggcaggaatcgctgcggtaacgaaagtgcttctccaaatgaagaataagcagcttgttccttctctgcattccgatattgttaatccgtttatagattttgatcaggttccttttcaagtgcagcggaaagcggctgaatggaatattccgcaaaacagccatgctgttcatcctttgagagccggggtaagcgcttttggggcaggaggaacaaacgcgcatcttatattggaagcgtatgaaccgccaaaagcatttgatcatcaaagcggccgagtgatctttgttttatcggctcaagacaaacaacggctgataaaatatgcaaaggttatggctgattttctatcagaaaatgaatcgaaggataacaatcataaactgcgtcttcaggatattgcctatacacttcagacgggacgcgatcatatggaagaacggctggcgatagtggcagattccgggcaggtcattgctgaagagctttcagcttatatcaggggtgaaaaaagcagcctgagccataccggtaatacattcgaatcagaagttcacaatgaaatgcctcacgtttgttcagattacgccgaagcagcatccaaatgggtaaatggaagaaagatagattgggagacttttgaggtgaatcggaatgcccgcaggatttctatcccgggacaaccgctgatcaaacagcggtattggatagcggaaaaaggggaagcacttgtttcagcggatgtgagtaagacgggccaccctttcttggggagtaacacgtccgattttcatcagttcagtttcacgaaaaaaatcagccgtaatcatccgttcgcactaagtctgtctgaaggaaacgtgtcctttttcccttatgcatctttggctgaaatggctatcgtcaatgcagcggcggcatttggacaaccagttcaaacattgaccgatttattgtggaccgaaagcatgaacggaatgacagatatacgggaactgatgattacgctgacgcctgagcgtgactttgcgcggtttgacatatatgcaaacacaaaaaatgagaataaagtacgtcttgccagcggaaatgcgcatatggttaagcctgaaagcggtatgcttcctgaagcgcttgatattgctgaagtcaaatcagaaatgactgaacatccggctgaagcgccttttgtcattgaatcagcgaaaaacagttacggaatgctgtcgcttcattcaatgccggatgagctttatgcaaaaagagaaaattttacgatttctcctgaagcgcttgagtccgcgattcaagccagtgcattttttgtcagcggagaaaccttcccggaattgatcggaatgggagcggcggatgtctatcagcctctcgctcaaaatttttatgtttatactcaaaaagtgaaccggcagaacagccgtgatgtaacgtgtcatatgacatttacagatggaaacggaagcattctggcggagtgcagagatgtgagattcagatatggtcatgaaaaagacactgttcagacggacgatgaactcattcgtctcctgcgtcaattggaaaccaatgatattgatcagaaggctgtattgaaacaattaatgggggaagaatgatgaacggaaaacgtgaacaaatcagcgatattcttgatctgattcaaacaggacaaatgtcggctgacgaaggctatgcccgtgtaacatccattcagaatcaaaaatcacgggcatcgaaccatcctcttttatattacaagccggaatggacagaatcgttcattccgagtacgaagagcgtacccttgacgggattgctcctgatttttgcagaaaatgaacggcaaatacaagaattgagcggtttgtttaaggactgcactctcttgtttgtcatccgcggagaagaatttgctgttttacatgatgatacgatttgtatgaaccacgtgaaaaaagacgattatctaaagctgttccgatacattcatgatcattatcagccgcccgaaaagattcttcacttgtggtctgattctcaggctgacatgagtaagggaggtatacagaaacaattggaaaacggattgttttctcttctgtatattacacaggcgctgattgaattaaaatggaaaaagataataaaactgacgcatatttttcaaactcagaataaagaacaactgccgctgcatcatgctctcggcggattggtgaaaaccgttcaccaggaacaccccaattttcactatcagattatcaatatcactcaatcagagggtgcgggagccgctcttccagcaatagctgatatatatcagagagagtgtgacgaaaaacgggatatccattttgaagtgcgctatgaaaacggcagacgttttacgaaaagctataataaagccggcttattcgatttaacccagccgctgaaacatcatgaaaattatctgattacaggaggcctgggcggtctcggttatatactggcaaaacatctgtcggaaaaatggaaagcgaatctcatattgacagggcgctctgatttaactgaagagcagaaaaaaaagatcgaatatttaagaagttcaggttcaacagttgaatatatccgatctgatgtttcaaaacaaagtgatgctgaacggatgtttgcttttgcaaaagagcagttcggcaccttacatggagtatttcacagtgccggcgtactccgtgactcttttatcttaagaaagacaaaagaagaaatcgatcaagtcacaagttcgaaagtttatggcgcgctctggctggcggaagaaatcaaaaaaatgaaagttgaattacttgtcttgttttcatccacatcggcagtcttcggatcagccggccaatgtgactatgctttcgccaatgcctttttggatcagtatgcagcagttatgaccgcaaaagagtctgccgaaagggtggtgtcagtcaattggccgctatggacttccggcgggatgaatattgacgatgaaggaatatcctacatgaaacaggaactcggccttgacccgctagatgacggtgacggaatacaggctctggagaacagcttgtgtcaatcatctgaacagctgatcgccctgaaaggccgaaaagaaaagattgaggatgtgctgaagcgtgccggcacaatcagcttacattcagaccggcaggaagatgccgatttacaaagcgatgaattaagacaaaatatcatcagttatctaaaaaatataatgtcagaggaattgaaattaccggtctcactcatagatgaaaaacaatacctggagaaatacggcattgattcagtgatgatcatgcgcctgaccaaaaagctggagcaaagtatcggcagattgtcgaaaacattattttttgaatatcattccatatcgcagttagccgaatatttcctgagtcatcacagcgaacgaatgatgaaactgctgaacccggccggcaaatctgaacttgtttcatatcaaaaaaagcaaaaaagaaaaccagtggaaacaaaagcgccggcacgctctgaaggagaaggttcaaaagagcacattgcggccgatcccctttctgctgatatagccattatcggtgtcagcggcagatatccgggtgcggaaaacatcagagagttccagaatgtgctgatgaatggacgggattgcgtaagcgaaattcctgatgaccggaaggaaatgctcgagggaagctgctataagtggggaggttttctgaaaaatccagaccggtttgatcctttatttttccggatatcaccgaaagaagctgcttttcttgatcctcaggaacgtctctttttagagacagtgtacaataccatagaggatgcgggttataaaccttcagatctgacccgcaaaaaggtcggagtatttgcaggcgtcacatatggaagctatcaatttttcggcgttgaagaatcacttaaaggaaatgaactggccgtcgggtctccattttctgcaatagcaaacagaatatcgtatttctttaattttaaggggccgagtatggcggtggatacaatgtgttcatcctctcttaacgccattcacttagcctgtgaaagtatacgaagaggagaaagcacacttgctgttgcgggcggagtcaatcttacacttcatccgaataaatatacattattaaatcaaagccgcttctttgcaagtgatggccgatgccgtacattcggcgagggcggtgacggttatgtaccgggagaaggagtgggctccgtacttttaaagccggcggcggaagcggtaagggacggagatcatatttatgcgctgattaaagcgacagcggtcaatcacggagggagaacaaacggttttacggttcctaatccaaatggtcagtctgaactgatacaggacgcgcttcagaaagcttgtattgaccctcgtacaattagttatattgaagctcacggaacgggaactgctctgggagacccgattgagatcaccggattaacaaaagcgtttcgggaatttacggagcacactcaatattgttcaatcggttctgtcaaatcaaatatcggtcatcttgaggccgcagcgggaattgccggtttgacaaaggttcttttgcaaatgaaactgaaaaaactgtttccttccatacatgcggagacgttgaatccaaatattgattttaaagcatctcccttttatgtacagcggtcattgcaagactggaagaaaccgaaactgcaggaaaacggaaaaacagtaactgttccgagaagagcgggaatcagctcattcggagcgggaggaacgaatgttcatatcattatagaagaatatgaagaaacaaacgtctcaacagaacatgttgagaacgaaccgcatattgtcctgttatctgccaaagacaatgaacgtcttcttgagtatgccgaaaacatgaaagattttattcagcgttcactaagtcctgaagtaaaggataaacagactgatatgaaagaaaaggtgaatgaagtactcaaaccgtttgtttcggaattgcttcatatccatccggaagaaattaatatttctgatcacctgagtgaatttggcgtagggcctttggaattaagccggatggcggattttattaacgaaatgtttcatattgaactcacgatgtatgaattaacggattgcccctccattcaagcggttactgaatacttactgaaggaatatgccggagcgataagagacatgttcccgaatgaagtgatggaaggcggccaatcggaaagcgtcgttttacgggatctggcatacactacacaatcgggcagagaagcgatggaggccagagcggcgattaccggtacctctcttaaagaaatgaaagataaattatctcagttttgccgcggtgacaagcaagttccaggcgtatatgttaatcagcaatcagatgcatttgctgaaaaaatgaaggcgttaacggaaggcagagcaggcgaattgtttgtaaagaccattattgagaacggtgaagcggaaaagctggctcaattatgggtttggggggcggatatcgactggaaatccgttcatcaacatttacagcagccgggtaaacggatctcaattccgacttatccgtttgcaaaagaacgttattgggttccgtccaggactgagaggacagagatccctcagcattcttctcaacatcacttgcaaaaaaaatggagggagaatccgtttgtaaatccatccgaaacaaaagagtacggactgacagtcgcatttgtgaatcaagacacagaatcaattgcccgcaccatttgtccggatatagatcaggagaatctgattgtcataaaacatcactcttcatatataaaacactctgatcaaatgtttgagtgttctttattagatgaaaaccacgcatacgacgttatctgtgagatcttctcgggcggtgagcggcaggtcgaaaatatatttgatttctcagatatcggaaaccagagtgaaaatcagaacggcatcccatatggtaaattcttatttatacaagaaataattaagcggagaaaaaaggaaacaccattatccattttacaactaaccaatggcttgcaggtatttaaagcggaaaaaccaaagctgacgggtgcagaatcagctgcttttctgaaagccctttctgcggaatacggctttgttcatgtgaaaacaatagatatagacagcatgaaagaaacgcataagctgaaacaaatctttgagattgaaagggcgcaatgtacaggagagaatgaagtatgctaccgcagcggcgtcagatatgttccgtattttgaagaagaaagaatcgataccggcggcggtcctgtttcatttcctgcggataaagccatcgtcattaccggcgggacagggggcattggcagagcaatagctgaagatttggtgaaacggggagtgaaaaaactcgtgctgacgggtacgcgtccattacctttgcgaagtgaatgggatcatttgctgaaagagggcagacaggacgaaaagacagtcagcaatataaaactgtttcaaagttttgaagaaaaaggtgtcgactatctgtattacagcggttctctcacaaatgaagagaagcttcgttcattctttcaccaagtaagccttgaatttaaagatattagcggtgtcatacactgtgccggactgcacagcggcggaaatccggcctttattcataaaagaatgagtgaatttaagacggtgtacgggccgaaagtcactggacttcagaatttggagcggatttttaataataggccgctggatttctttattctgttttcatcaattgcagcacagtcacccaaactgtcgaaaggaatgactgattacgcgtctgcaaatgcatatatggactatttcgcggcttatcattttcaaaaggggagaacgtatttcacgtccatcaattggccgagctggaaagaagtcggaatgggtactgtgacgagtcctttatatgatgaattgggattggactctctatccacgcgggaaggactggcgattttgtatcatgcactggagaaaaaatcggccaatatcattcctatcgtgaaaaaaggaacagtgtttcatgcagacagtctcctgaacatcaataaaaccggcaagacttcatttccggcccgaagacaggagactcccggcacttttgatcattcagaagggcttgtcagtgaactttctgccgtatttgccgaggaattgagcataccccttgaaaagcttaacccaaatacggattttcaggaatacggtgtggattctatacttcttgtcagcattatacatcgtatagaagcaatgattcagaaaaaaatcgaccctactgtgcttcttgaacacaacacgattcatggtctcgcggaatatatcggtaagacggcgccgccgttgaaaaaacaaatcgaacagactgattctcaaagcagcaatcagcatgatatgcagtctgtgacgagccgaaatacagaaccgcagacggcttccactgcaaagatagctgttatcggaatcggatgtaagtttccgggcgcggctgataaagaggaattttgggacaatctgagaaaagggaagaatcatattaaagaagtacctgattcccggtggaatatagaagaacattactctccggtgcagcaaaagggaaaaagcatcagcaaatggggaggatttattaatggaatcggcagcttcgatccggagtatttccgtatggaagaggagaaagccatccaaacggatccgctgataagacatttcttagaaacgagtgtacagactgtacgtgatgccggttatgaagaaacagaattatcgggaaaaaaagtcggcgtatttgtcggttccagaatgggcggctacggtcacaaactgccgaaagaaagcagcagccacatcgtcgggcttagtcaaaactttattgcttcacatgtgtcgcatttctttaattttcacggtccaagcatggtgtctgataccgcttgttcttcttcattagtcagcattcatttagcctgccaaagcataaaaaacggtgattcagaaatggcgctggcaggaggggcggatctgcttttggatgaaattccttacctgatgttaacagaaggaggagctctttcgccggacggtcagtgttttacttttgatgaaagggcaaacggctttgtacccggagagggttttggcgctgttcttttaaaaccgctggagaaagcaaaagctgacggaaatcggatatacggtatcattgaagcatcagctattaataacgacggtgcgacaatggggattacgactccgaatcctaagcttcaagagcaggttattcaagatgcatttgaaagagccgatatcactcccggatcagtcagctacgtcgaaactcacggcacaggcacgatgattggagatccgattgagcttcaggctctgacaaaagtattccgaagagacacaaacaaaacgcaattttgcggagtaggaagtgtaaaaaccaatatcggacacttattaagcgccgccggagcggcaagtttcattaaagtgattttatcaatatggcataaggaaattccgcctacattgaattgtgaaacgccaaatccccgctttgaatttgaaaagtcgcctttttatccgaatacagaactgagaagctggaaggatggaaaacggagggcgggcatcagcgctttcggtttcggcggaacaaacgcccaccttttggtaagcggcctggatgattcatatcattccgtcagaactccgctgccgcctgccgagtttgtcagaaaagagtactggccggattcaaatcgaaaaaaacaaatcaaacagaataaaaaacggcttcttgaaattattgatgaaacagagtagcacctgctctgtttctttactttgtaaaagaagaaaggttgtcgagttgcatgaggttcagcgtattagtcaaacatgacgattatattgtttcagaccatgtccttcatcaagtgcgtacgatacccggcgtaacgtatctggatttaataacacgatttttagctgagaaagggatatcaccccgaagttttgaaatcaaacatgttttattccgtgaacctgttgcgacgtcagtccattttgataaaaaagtcaccttccagtttacggaacaagaaaacggctggcttgttgaaacaacaagcaggaaatgggtcgctgaaaaggcggaaggtgaagcgtcagtcaacttgcaggcggaaatcataagaaaaaatgcgatagacgaaaagacaatttcaatcgaagcattaaagaaaggggccgtccggacttcgaatgctgaagccgcctatcgtaatttgcgcaggggcggcctgattcataaagattttatgaaattggaaggtacggtatatgaaggtgaaaattatattctgggagaggtcagtttaagcggactttcaaaagaatatacagatgacttttacatgcaccccgcatttttggatggatctctcagcctgttgggagtccttacatcagacttgccggatgaaggaacaaatgcgtttatccctatatatattgagacattccgggcactgcataaaacaaccgggtcttgttttgtgtatattgataaaaacagtataacgcagccgccttctaaagacattttatatgcggacatagaagtatacaggcctgatggagagcttgctttttattatgagcgattcggtgtgaaaagagtcagaaatgaaaaatcaatacaaaggctggagcattcccaaaaagctaaagacgtcggcagcgtaacgaacaataaagaaatgatcagaaataatttaatccaagagatagccggcatgattgaaaagcctgctgaaacggtgaagaatgatatttccttttacgagatgggcttggattctaaacagttattagacttatctaaaaaattagaactgttgttaggttcaaagctgtacccgactttattatttgattactccacaatcggtgaattgacggaatatctgcaggagaaatacggagctcgcgttacagactctatctctgatacagttcagcaccaagacagtcaaaaaacattaacagatgagctgtcatccattattggagatgtgacaaacacgccgccaaataaagcggacaaacaccaatctttttacgaactgggtcttgactcaaaacagctgctgcatatatcgaaaatgctcgaggaaagattggatacacaattgtatccgacattgctttttgattataacaatattcatgatttagcagcttatttagaagaaaaatatgatgtgcgtaatacgccggccgcagcttttaaagaaaaaacgcaaacgaaagagccgtctgaaaagccgatgcttgaatctttatatttacaaaaagaatggatagaatcgccattaaagtccggagaagtgcctaaggaaaatacattgattttcgatttcggcagttcattgagtgatgaaatccgaaagtacatcggcagtgaaaatgttatttatgcggaagccgccgctgaatatgaaatggtaaatgaaaagcattataaatttaatccggagcagtctgctcattacaccagactgttagatgatatgaaaaagtccggagcgtttccggcgtcaatcattcattacctgtcaaaacaagcttatactgaggcagcgttagatttgactcacagcttttattcaatcctttatttaagtaaagcgttgatccgtcaaaaaataaaagataacatcaaccttttgtacgtacatgacaaggatcaatatacaaatccgatttacgccgcgattggaggcttttttaaaacgcttaatgcggagcagccgaatataaagtgtaaaacggttgagatttcttcaagacaaaccattgaaaaagcatctttgcttctcaatgaattaagtgccggacatcatgaggctgtgaaatatgacggcgatcaaaaaaggcgggtgacagcatacaaagatgcttcgctgcaaccagggcaaaaggccgcaaagtttgtaaaaaacggagtgtatctcataatcggagggttaagcggcatcggctggattatttcagcgtttatttatgcaaatcacggagccagcgttatcattgccggacgatcgaaaatgacagcagaaatggaagaaaaattagacagcatccgatatgacggggcaaacatttcttacatccaggctgacatgtcagataaacagcaggtcatcaatttagcggaaaaaattcatgctgattattccgaaatcaacggggtcatttacagtgcaggcgtgttaaaagactctttcattatgaataaaacagacgcggaagctcaggcggtgctgcaatcaaaggtcaatggtgtgattcatttggatgaagcgctcagaaatatgcctttagacttttttgttttgttttcttccatctcttcagaaatcggaagtttgggtcaagctgattacgcctacgccaatcgttttctggagcattttgccgagtggagggaatgtatgagaaaggagggggggagatcaggaaaaaccatcgctgtaaattggcctttctggaaagacggaggcatgtcagttgatgccggcattcaagacattatgaaaaccgagtacggacttcacccattagaaaatactgccggaatcaaagcttttgaacactcgcttctcggccaaggccaccagctgatcgtgttatacggagaaaaagaaaaaatacaaaataatttcaatccgttatccgcccgttcagcaccgcctctggtaagagattcagcgattgcagccgattttgatgcttcgtcaatcgttacggaagaagaagctgaaagtcctttccgaatactcggcacagcttccaatcgtcatctagacgattatttgcattattggagcagactgaagaaaggagcccttcagcacgatcaaagcgatgccgcaaaaaaactcatcgctttttaccagacagaagaaacggaaaccgttcattttctggctaacacagaaaatgcccggcatatggaaatattgatgagcggtaagggtgaaacaattttactgatttgcggttttgctaccactgcttacatgtggaaagaacaaatgaaggagtgggcagaccaatttaatgtaattgtcatacacacaccgggttacgggctgagtgaggggagcgccgattttacactgagcgggctggctcagacttttattgaagtgctgaacgagataggggttgcttggccgatccacattgcggcagcttcttggggaggcatgataggacagaggatagcctatgaataccctgaaaaagtaaaaacactcattctttccggaagttacaccgaatacgaagaagaccctgaaagcagtgttgaggaaaaactgaaaaatgattttatagctataggaaaatcgcatgaatatgaaagtttatacaggaatcaattcttaaatgcttctattgaacgttttatgaagatacatcaacaagaaggctattctacgatcggctttttaaaagacatttatacaagaacgcttatccttacgggagagaaggaaagcgtagttgatcagaaagaaacaaaaaggctgaagaaactgctgagcaatgcagaattaaagaaaattaagggagcggggcatcttccgaacatcacacacccggaagaatttaataaagcggtgtcagaattcatcaagaaatcagtaagtaagggatgaaaacgatacatacagtacagggggagaaaacaatgaaacaaacaataagcaatccggcatttgatatgaaacaaattaacgctcttaacagccattatcagacgatgatagacaatggagatctgcaatgcgcgagttatatgatatcaagaggaggcgaggtttttgcggctgagtcgttaggggaatttaccggcggacaaaaagaaaagcaaacatttcagcttgatacaatcagagaaatcggttctttgacaaaagtgtttaccgctgcagccgtcatgcagctcgtcgaaaaaggtctgctcgatctgaaaatgccggtcaagctcattttgcctgcatttgataaaccgggtttcggagacattaaaattttacaccttttgactcatacggcgggattaagttttgagctggatattcaaaaggctgaaggcattgacttaacgaatgaggaagaatggataagctatctggtcagtacgcctttagagtacggagtggatgaagcatggaactattccagaaccggctttgtcatacttggcatcattatttccaaagtaacaggcatgtcctacgaacagtatgtaacaaagcatattattgaagcgctcggattagaaagaacgtttttttatgtgcctgatgctttaaaagaagaagtttgtgtgatcaatgagcacgagtgcgtacagctggaaaaaagtcatcacccgtattttccgaataaagcgacaagcggtctgtactcttcattggaagatatttggaagttagctgaaatgtttagaaataaaggcagattgaaagataagaagctgcttggaagaaaaacagtcgaggccatgctgagaaatcaaataaagcccggtcttcctttttacttcttcggagcgccaagagaggagggcggctttggtttaggcattaatttgtggccggccggtgaccattatttcatgacagaaggcacgttctcacatcttggaatgggttggtgcggcatgttttctgatccagccgaagattttacgtatgtatttttcactccgatttccgagtttcatcctcatgccgtactgacgccgctgaatatcgtgtgggcgggtattgaataattagacaaaagcatcgtcccgcctgttcggcaggcgggacgattgctaactgcccgtttttatcccgcggcaccttctcaaagcctgccctcgaagttaaataacttaatttactctttgtaattttttttaattatagtacagtagagcgtttttataatacagtttaaagtcttttatagtacagtttggcgcagtatgatcttaagttttataagcggtttcaaaataaggttataaataattgacggctttgtttaattactgtaaactatggttgttgatcatattgtactaataaaaaatctttttttattagtacagtttaaacgtcattatctttgcttaagcgctatgtgaatttctgaatgattaattttagaattgcagagcatgataagactgtttttaatacggatggctaaacggtatcctaaccctgttaaatcaaaagaagaggtggtttaaaaaatggctgcaaagacaaaaacttcaattgttgatagcaaaaaacaatttgatgctattaataagcagtttgaaacgttccaaattttaaatgctgaaggagaagtcgtaaataaagacgcaatgcctgatctttcagatgatcagttaaaggaattaatgagaagaatggtgtatatccgcattttagaccagcgttcaatttctctttcccgtcaaggacgtttaggtttctatgcaccgacagcgggccaggaagcttctcaaattgcatcacacttcgcgcttgaacaggacgactttatccttccgggttatcgtgacgttcctcagctgatttggcacgggcttcctttacatcaggcattcctgttctcaagaggccattttaaaggtaatcagatgcctgagggagtaaacgctttatcacctcaaattattattggtgctcaaattattcaaaccgcaggtgtagctttagggcttaaaaagcgcggtaaaaaagcggtagctattacttacactggtgacggcggagcttctcaaggtgacttctatgaaggaatgaactttgccggagcatttaaagcgccggcgatcttcgttgttcagaataaccgctatgcgatttcaactcctgtagaaaagcaatcatccgcacagacaattgcccaaaaagcagttgccgtcggtattacaggtgttcaagtagacggaatggacgcactagccgtttacgctgcaaccgcagaagcacgccagcgcgcaattaacggtgaaggtccgactctgattgaaactcttacattccgttacggacctcatacaatgtccggtgacgatccgactaaataccgtacgaaagaaatagaaaatgaatgggagcaaaaagacccgctcgtacgtttccgcaagttcttggaaaacaaaggactatggtctgaagaagaagagaacaaagtgattgaacaggccaaagaagaaatcaaacaagctatcaaaaaggctgacggcgaatcaaaaccgaaagtaacagagctgattgagaatatgtttgaagagccgacgttcaacttgaaagaacaacttgaaatttacaaagcgaaggagtcgaagtaagccatggcgcaaatgacaatgattcaagcgatcactgatgcgttacgcacagaactgaaaaacaatgaaaacgttctgcttttcggggaagatgtaggcgttgccggaggcgtattccgtgcaactgaaggccttcaaaaagaattcggtgaggaccgcgtatttgacacgccgcttgctgaatccggtatcggcggtctcgctctcggtttaggcctgcaagattaccgtcctgttatggaaatccagttcttcggatttgtatatgaagtaatggattcaatctcaggacaaatggctcgtctccgctaccgttccggcggacgctggacttctccggtgacaatccgttctccattcggcggaggggttcatacacctgaacttcacgctgacagtttggaaggccttatcgctcagcagccgggtattaaagttgttatcccttccactccttacgatgcaaaaggactgctgattgcctctatcagagacaatgatccggttgttttcttagagcatatgaaactttaccgttctttccgtcaggaagttcctgaagaggaatacacaatcgagcttggcaaagctgatgtgaaacgcgaaggtactgacctttctatcatcacatacggcgcgatggttcatgagtcgcttaaggctgctgaagagcttgaaaaagaaggcgtttctgctgaagttatcgaccttcgcactgtaagtccgcttgatattgatacgattattgcttctgttgaaaaaacaggccgcgcaattgtcgtgcaggaagctcaaaaacaagccggcatcgctgccaacgttgtagctgaaatcaatgaccgcgcgattctgagcctggaagctccggttctgcgtgttgcggcgcctgatacagtatttcctttctcgcttgctgagagcgtatggcttccaaaccataaagacgttcttgaaactgcgaaaaaagttcttgaattttaatcaggcatcttaaaagacggtaaagagagtccttttctcttatgatgaaggagtctgtttactaggttcaatgcttgcgtatgcataactaaaatttgcttaatcaactaggaggtcgaaaactgtggcatttgaatttaaacttccggatatcggggaaggtatccacgaaggcgaaatcgtaaaatggtttgtgaagccgaacgacgaggtagaagaagacgatgttctggctgaagtgcaaaatgataaagcagtggtagaaattccttcacctgttaaaggaaaagtattagaattaaaagttgaagagggaacagttgcaactgttggacaaacgattattacgtttgacgcacctggttacgaagatcttcaatttaaaggaagccatgattcaggagaggcgaaaactgaggctcaagttcagtcgtctgctgaagcagggcaggatatctctaaagaagagactcctaaagagcctgcaaaagaaaccggcgcaggacagcaggaccaagcggaagctgatccgaacaaacgcgtgatcgcgatgccttccgtacgcaaatatgcccgtgaaaaaggcgtggatatccgtaaagtaacaggttcaggcaataacggacgtgttgtaaaagaagatatcgacagctttgcaaatggaggagcggctcaagaagcgggaccgcaagaaacagctgcacctcaggaaacagctaaacctgcagcagctcaggctcctgaaggcgaattccctgaaacacgcgaaaaaatgagcggtatccgtaaagcgattgcgaaagcaatggtgaactctaagcatactgcaccgcacgtaactcttatggatgaagttgacgtaacaaatcttgttgctcaccgtaaacagttcaaacaagttgctgctgatcaaggcatcaagctgacttatctgccttacgtcgtcaaagcattaacatccgctttgaaaaaattccctgttttaaacacatcgattgatgataaaacagatgaagtgatccaaaaacattacttcaacatcggaattgcagcggataccgaaaaaggcctgcttgtgccggtagtgaaaaatgccgaccgtaaagccgttttcgaaatctctgatgaaatcaacagccttgctacaaaagcgcgtgaaggcaagcttgcacctgcggaaatgaaaggcgcttcttgcacgatcacaaatatcggttctgccggaggccaatggttcacaccggttatcaaccacccagaggttgcgattctcggtatcggccgtattgctgaaaaagcgatcgtccgtgacggtgaaattgtagctgctcctgtcttagctctttctctcagctttgaccaccgtatgattgacggagcaactgcacaaaatgcgttaaaccacatcaagcgtttactgaacgatccacaacttattttaatggaggcgtaatgttatggtagtaggagatttccctattgaaacagatactcttgtgattggtgcgggacccggcggctatgtagctgccatccgcgctgctcagcttggacaaaaagtaacagtcgttgaaaaagcaactcttggaggcgtttgtctgaacgtcggctgtattccttcaaaagcgctcatcaatgcaggccatcgttacgagaatgcaaaacattcagatgacatgggaatcactgctgagaacgtaacggttgactttacaaaagtccaagaatggaaagcttctgttgtaaataagcttaccggcggtgttgcaggtcttttaaaaggaaataaagtggacgttgtaaacggggaagcttatttcgtagacagcaactctgtccgcgtaatggatgagaactctgcgcaaacatacacatttaaaaacgcgatcattgctaccggttctcgtcctatcgaattgccaaacttcaaatatagcgaacgcgttctgaactctacaggcgcactggcgcttaaagaaattccgaaaaagctcgttgttatcggcggcggatatatcggtactgagcttggaacagcgtatgcgaacttcggaactgaattggttattttagaaggcggagatgaaattcttcctggcttcgaaaaacaaatgagttctctcgttacccgcagactgaagaaaaaaggcaacgttgaaatccatacaagcgccatggctaaaggcgttgaggaaagacctgacggcgtaacagttacattcgaagtaaaaggcgaagaaaaaacggttgatgctgattacgtattaatcactgtcggacgccgtccgaacactgatgagctcggccttgagcaagtcggtatcgaaatgactgaccgcggtgtcattaaaacagacaagcagtgccgcacaaacgtaccgaacatttacgcaatcggtgacatcattgacggacctcctttggctcacaaagcgtcttacgaaggtaaaatcgctgcggaagctatttcaggagagccggctgaaatcgattacctcggtattccggcggttgtattctctgagcctgaactggcttctgtcggttacactgaagcacaggcgaaagaagaaggcattgaagtcgttgcagctaagttccgtttgcagcaaacggacgtgcgctgtctcttaacgaaactgacggcttcatgaagctgatcacccgtaaagaagacggtcttgtaatcggtgcgcaaattgccggcgcaagcgcttctgacatgatttctgaattgagcctggcgatcgaaggcggaatgactgctgaagatatcgcaatgacaattcacgctcacccgacattgggcgaaatcactatggaagctgccgaagtagcaatcggaagcccgatccacatcgtaaaataatgatgtaacaaagaaacagcccccgtttgtaaaagcgggggctgtttttattgtgcaagcacatgctgcataggtttgatgatatcctcttttttctttacggatccctcaatcttcatgaccacatgccgatgattgatcaccatcagcgcagggaacgtgttgatttcctcttcccatccctttctgttgtcataaaccttcatttgatcgacatgatggggatatttcttttctaaatcaagaatcgcatcgtaataaggaacttctttatctatatgattttcatcggaaaaaaacaagatttgagtgtgatgaatgctgtcgatccggttatttttgaatggaatgacagtagaaaccgaacagcttgacagaacgaacagcatcaaaaaaaagggaatcaccgtacggtagcgcatctatcttactcctctgttttatataatatattggttcatccatttataaggactatattaagtgtatcacgagaggtgaaaaacctaaggcttgttactgaattgttatataattgaaaccgtttttaatgaagaaataatacgtgtgacaacttgcacagccgatgtgtaaaaaaggcacattgtttttcgtgagagcgctgttttttcgttatactgggggcaaaaccatatcaggagggattgcatgtataaagccattgcagccgtcatatgtatgtgcttactcgccggctgccaatcaaatgaaaagatgcaaacaaacaaaccccattctcaagccgcggccaatcatgccaaacgggaaaaccatcatacaaaagagaaaaaacagaaggcggagccccgttactatatcaatccgaaaaccttttctgtggaaaaaatggatgaacagaaagagaaaaaaccgatcgcattggtaacgatcgatgacgcgcctgatcagcatgccgctgagattgcggacaaactgcatgatctcaatgcgtcagcgatcttttttgtaaacggacattttttgaaaaaagatgaaaataagaaagcgcttaagcatattcatgagttaggttttatgatcggaaatcatacaatgactcatcaaaacttaaaagatctttccgaacaaaaacaacgggaagaaatcattggcgtcaataaagcggttgaaaaggtaataggagagaaacccgcatttttcagggcgcctttcggaagcaatacggactacagtgacagacttataaaaaaagaaggtatggtgaaaatgaactggaccttcgggtatgattgggatcagaaatatcaatccaaaaaagcgcttaccgatatcacactgagcagtccttacctgcgggacggcgccaacatattgatgcatgaccggaaatggacggctgaagccatgccggacattgtaaaaggattgcgtcataaaggatataccgtgattaaccctcgagctataaaaagaccgtaaaaaataaatgtgttatacaatttatcagttgacatattaaatgtgacataataatataataacaacaagtaaaaattaagcgttttcaaattctgagaaatggggaatgacagatgggtacaattgtttgccaagactgtaacgaagcgattcattactttgaggatgagaaggtcacgacgttatacggaacatgctgcggacaatgccagtgtcatcttgaagaagagtaaaaagcgtaaaaaaggcccgaaacgatttcgtttcgggcttctttatgtttattggatggctttttgctctttgatgactctgatcatttcaagcgtggcatcttcgggaccctgcacaggaaggccggcgtccaagtttttaaaaatgtagctgatattttcttcagtaatgatctcacccggaataaagatcggaattcccggcgggtacaccatgacaaactctgcaatgatccgtcccgcggattctgttaacggaatgacttccgtatttgcgtaaaacgcgtctcttggcgtcatcgctaacagaggaatctcaggaagcagaacttccgtttgctgatgagcataatcatttgcggaagcctgctttgaaatgtctgtaagcgcgcttacaagacggtcggcatctcctgctctgtctccgggggtgaaaatacataaaatattatacaaatcggacagctcgacttcgatattaaatgattcgcggagccatttttcaacgtcatgacccgtcaggccgaggtttttgaccgaaatgattaatttagtcggatcataactgaaggcagcttttgacccagtgatttcttcgccgacacagcggatgccttcaatttgattgaggcgttcccgtgtctgatccgccagcagaatcgtatcttcaagaagatcgcggccttctgtagcgaggcgttttcttgcgacatccagtgaagcgagaagcagataggatgttgacgttgtcgtcagcatgcttaaaatcgactgtactctttctttggaaacaaggccttctctcacatttaaaatggagctctgcgtcagggagcctcccaatttgtgcacgcttgtggctgccatatcagcgcccgcctgcatggcggacagaggaagcttatcatgaaaatgaatatgcacgccgtgcgcttcatcgacaagaacaggcacatcgaaagaatgcgcgagctttacaatgctgctcaagtcagctgccacaccgaagtatgtcggattgatgacaagcaggccttttgcgtcagggtgttccgtcaaagcccgctcggcggactcaagcgtaatgccgtgagaaattccgagctcatcgtcaatttccgggtgtataaaaatcggcaccgctccggaaaatacaatggccgacataatggatttatgaacgtttctcggaatgatgattttatctccgggtccgcatacggccatgaccatcgtcataatggcgccgctcgtcccttgtacggaaaagaaggtatggtctgcgccgaatgcttccgcggccagatcctgggcttctttaatgatgccctttggcgcatgtaaatcatccaggggttcaatattaattaaatctatgcttaacgcgttttctccgataaattgtctgaattccggatccattcccgcgccttttttatggcccggaatgtggaattggacaggctgtctgtccgcgtgctttttcagtccgctgtacaggggtgtttcatgttgcggcaattgttttcccacctttatcataatacctacggattagtttgtattacattcagttttattacccgttttttaaacgtaaaacaaatgaattatattatgaacttgaaagaaagtaaagaacaatttatgatctatggaagatgcttatttttgagcatgatgataaaggagtgaagacatttggaatatcaatatccgatgaatgaggactggacgacagaggaggccgtggatgtcattgctttttttcagcaggtggaaaacgcctatgaaaaaggagctgaccgagacagacttctgaatgcgtaccgccgctttaaagaaatcgttcccgggaaagcggaagaaaagaaaatctgcagccaatttgaagctgacagcacctattccccgtatcggactgtgaaacaggcgaaacaatcagatcaagcgattatcaaaatgtagacaaaagcgagccggcaatcggcccgctttttatgttatgagactttctgagtcagtgtgtataaaaaggaaagcttcctaaaagcatcttcaatggtttgcaggaattcattgttgttcatgttgatcacgtcttctttttgcagctgaatgccgcataaaagctctgcttttttcactgtctgcaggcgttcaaataatgttttcagctgctcctgatccatgtcggactgcttgtacgcacctggcttcgtatgatccggcgaccatacaaaatgaccgggaatctgttttgtgatttcctcctgcttcgcttccagcaatctgccgtattcctcttttatcggagattcataaatgatggcaaaccatacaaacatatgggtgtcccataaaccgatctgaaagtgagggagtttcttatagccgcgtttgctgttggcaaaggcaacccagctgtcagccggcgggttgacagatcttctcgcgtgcttggcgacatgcgggaacatttcatctcctgtcaatgctgacaatgtcggtgcgaaatgctctcctaacaaggtcagcttcggacggacttgttcttttaacacctccatgcgcggatctaaaccttctattgtaaatgtatcgaagtcttcttttgtaaaacgcatctgagtcatctttttcctccttaacgtaagtattcatattttaccacagccgccgcccgccgcaaaaacattgagaacgtttgagtcgagaggaatggtggtaaaaaacgaataggtaaacacacaattttaagaatgttgttacagccgaatataagtttccatacgatataagaagtatcattaatgaattggaaaaatgggatgcttttttaacaaatgatctctggaaggggcgaaagacaatgaggcaagtggtgaaggaaggattcagggaggaaaaaaataaccgtgtagctgtctggagactagaggttgattatgaattggcaaccctgtacgaggccatgcaaaaagagaatgaagatcaaatcgatctcagcaaaagaaaactggaacgtctcagaaaagaatggattcggcttaacggataaagaatagtaaaaacgaaccgcaggaaatggttcgtttttacgtgagaaggcatttttttcattttccttgctttttcatcgcctttatcagtatgctatagaataagctatacatagaaaagaggtacacggtatgacaaattggacggaaattgatgatatcgcaaaacaatgggtaaaagaagccggaacgagaatcagacaatccatgcaggaaagcttgacgattgaaacaaaatcaaatccgaatgatttagtcacaaatattgataaagagacggagcgctttttcattgaccgtatacaaggaacttttcccggacaccggattctcggagaagaagggcagggggataaactccgctcccttgacggaatcgtctggatcattgatccgattgacgggacgatgaattttgtccatcaaaagcggcatttcgcgatctccatcggcatctttgaagacggaaaaggcaaaatcggcttaatttatgatgtgatgcaggacgaactgtatcacgcattcagcggaaaaggggcttatctgaatgatacgccgcttgctcctttaaaagaagcttccattgaagaagccattattgcaatcaatgccacatgggtgacggaaaacagaaggattgacccgagtattttggcgccgctcgtaaaacgggtcagaggaacgcgttcctacggttcggcggcacttgagctggccggtgttgcggccggccgcattgacgcatacattacgatgaggctcgcgccgtgggattacgctgccggctgcgtgctgctgaacgaagtcgggggcatttacacgaccacagacggcgaaccgttcacgtttttagacaaccacagcgtgcttgcgggcaatccggctatacataaaattatctttgacgactatttacatgctgacaggtagagattttgaagaagaagatctcgggtttctggagcagctggcggcatcacacccggtgtggaaaaacgaagagttcggaacaaaaaatgcggcggagtttatgcttgcatactccatgtacaatggaacgtggctcgtatgggagattgacggcgctcctgccgccgtcagttttcatttggaatgggcgccttcaaacggaaaaccgtggctcggaaccgtggccgtcgctccggaggcaaaagagaaaggaatcggtcgcgcggtcattgaagagattgcgggccggctgagaggagagcataaagcgatgttttcagccgttcccctggacaggcaggaatgggttttgtttttaagccaatgcggctttgaacagcttaagcttgaaaaagacgatcgggaaaagacatatatgatcatggtgaagccattgtgaaatgttcagatataaaaaagagaccggatttctccggtctcttttcttgtttacaagccgaccgcattccaggccgcttctacgcttgcagcgtcttgagagccgtaaaggtcccgcgctgattgaatcaaagctgcttttgcatctttaaagcttgatgacggagtgagatataccgtcagtgcgcgatagtaaatctgctccgcttttttcactccgatttttgtaatcgtgttgtaagcggctttgttcggaattccgctgtttgtatgcacgccgccgtagtcgccggcatcagtgttcggaaggttttgataatttttgtaatggtcgggctgtccgtattttgtcggattggataagctgcggagagccggctggctgaccgtaatatcctcaccgatatcccagtcctcagtatcggtgaagtacccgaatacatcggagaaggattcgtttaaagcgcccggctgattttcatagttcaggttggctgtttcctgtgtaacgccgtgtgtcatttcatgggccgttacgtccattgaaccggaaagaggcgagaagaatgagccgtcaccgtcaccgtaaatcatttggtcgccgatccaggccgcgttattgtatctgctgccgtaatgaacggaagatacgattttgccgcctctattgtcgtagctgttgcgtttaaacgtctgatagaaataatcatacactttgccgagattgtaatgcgcatcaaccgcagcgcgctgagaagaagttgtgaactggtttgtagtgcttgatacgagcgtgcccggcaggttatattgtcggttttgcagatcgtacgtaataatttgtgttccggtaggcttcgaaagatcacgcattacatatttgccgttttcagaagaaatatttaatgagaccgtttttcctttaagagtcgtacctgttccggttgcagcggcatgctccactttgttttgctttttcaggactttccctgtttccgcatcaacggttacttcccagttagctggttccggttcgatgtagcggatggttacatcataggcgagtcggtatttaccgtcttttgtggccgctgctttcagctcggctttgtttttgtttgcaacgttgccgttggagacggcttcaggtgatttgccgattgctttaaaagcatgatccagcgcctgatttgcagataattttttgctgtttgccgttttggcagaagcatcgttgtttaattcaccgttaatcgcatagacattgttggatttatcgacgtgaataatgacttgcgagtctttcacaggcacaccgttaacgacaggcacataacggaagtgcttatagccgagatcatcggtcgtgtggtcaatcagcttcagtctctcagaagggttgcctttgaagactttgccgttttgtttcaagtattgcttgattgctttgtcactgactgaaggcaattcagattgcaccaaagaatgcttcggcacaaagttcgtcaggttttctttaagctgaggattctcagcggcctgaacacccggaagactgatggttaaactcataaaggaagcggcgacagcaacagacaatttcttacctaaacccacaataaatccccctttttgaaaataatgaaaacttatattgttataataaaccagcattctctcattctgcaatataaaactagacttcgctgatgaattgatagaatcgtcccgtaaaggcttcaggcgggcagcgtcaggggataagccgagaggcacgtgttgaatcaaacatgagtcgaatgatgcgatttattctgaaaaaaatgacaaatgaagtcgggagaaataatagaggaaaaatgttccgatctgtaaaactttttttatagccgtttgtctaaacaggtgaggccttaataaacgaaaaggattgtttcagatgtcagagattttcagtcattttattcagcatttcgacagatatttcaagagctgtcttacgaagagattgctgatgttttggactggagtctttcgaaggtgaagagcactctgtacagggcgagaatgcagctgaaacagcacttagcggaaaaaaggaaggacggacagatatgacttgctgtttagtgagagatttactccctatatatattgaaggcgattgtgaaacagaaacggagcggtttatttcccgccaccttgaatcatgcggtaagtgcgaaagtttatatcatatgatgaaggagccgcttgacctcggcagccccgagatgaaggagcccgcctgttatgcagaagaagaaaggcggtttaaggaacggtattacgggaagctgctgataaaagcagcctgtttgttcggcgctgttttctttatcatgctgatctttaaactgctgattaaaaaaaacgcccggctgcatgacatgaccgggcgttttatccgtttactcagccggatgaaaggctgtataaatgccttcaagcaagtcctgaggcagtgaattaaagaatccggcacacagctttgcttctttttttcctgctcctgctttttcagcaaggtcctgatcaaacgtatacacaccgtcttcttcaatcagcgcagattgaaggatatgaagactttgggaaaaagtggtgaacagctgatcaacgataagggcctctttttccgtaaatccgagctccaccgctttttctttattaaatgtatattcgccgtccgttttctcaatacattgagaaagaacggttaaaaattcggttgaactgtcccacagcttttgaatggtctgtgcggcttctttatctaatcccaattcaaccgctttttcaccgtcaaaataatagacgccgtctttttcgtaaatcgattggctgatgatgtcaatgagttttgccgcgtcttccggtgttttctctgcggaaacctgcagggtatgcggttcatttgcctggatcgtttttgcgccggcagaatcaagcggactgaatgcaagcaaggcggctgaggcggttgcggcggcagttacagcggttttcttcaaaaaagatgttttcatttcattctctccttgtcatgtgtatttgcttacagtcacaagtataaaaagacaatgatggaattgatataggaggtatggtattttctgcataacgatgccggactatttcagactgtatattctgagggaatctgctgatgtaactagaatgggggccgtcattcccggcttcctgactagacggcgggggagataagccttacatctggagtctgtttttgaggaggtaaaaaagcctgaatctttgattcaggcttcataagatattgtctttccatgtttacggaattttgcaaagggtcatgcttttaatcaagcagtccctgttcgcgcatttttttctttacggtgaaaccgcttcccatcatggcgataacgagaacaatgcttccgatgatgccccatgcgcttttctcagcgattgatacgccgatcagcatcatgctgaagactgctgcgaatgcaaataataataagagccaattcaattttttcatatttccatcccctttaacgtcatactttcagtttacagaaaaacgtaacgcttttaaagaggatgtgtggtataatatgaaagttatctaatttttttaggagatgaaaatgtgaaacttcgaaacgatcttcgcaacatcgcgattattgcccacgttgaccatgggaaaacgactttggtagaccaattgcttcaccaagccggaacattccgtgccaacgaaaatattgccgaacgcgcaatggattcaaacgatcttgaacgtgaacgcggtattacaattcttgcgaaaaatactgcgattaactataaagatacacgcattaatattttggacactccgggacacgccgacttcggcggagaggtagaacggattatgaaaatggttgacggcgttctgttagtcgttgacgcttatgaaggctgcatgccgcaaacccgtttcgtactgaaaaaagcccttgagcagaacttaaatccggttgtcgtcgtaaacaaaatcgaccgtgatttcgcccgcccggaagaagtcattgatgaagtgcttgatttgttcatcgagcttgacgcaaacgaagaacagcttgagttccctgtcgtctacgcttctgcgattaacggaacggcaagtctggatccgaaaaagcaggacgaaaacatggaatcactgtatgaaacgattcttgaacatgtccctgccccggtagataacgccgaagagcctcttcaattccaagtggcgctgcttgattacaatgattatgtcggccgtatcggtatcggacgcgttttccgcggaacgatgaaagtgggtcagcaggtttcattgatgaaacttgacggaacggttaaatcattccgtgtaacgaaaatcttcggtttccaaggattgaaacgcgtggaaattgaagaagcgagagcgggagaccttgttgccgtttcgggcatggaagacatcaacgtcggtgaaacggtttgtccggctgaccaccatgagccgctgccggttctgcgcattgatgagcctacgcttcaaatgacatttgtcgtaaacaacagcccgtttgcaggccgtgaaggcaaatatgtcacagcccgcaaaattgaagagcgtctgaatgcgcagcttcaaactgacgtcagtcttcgtgtcgaaccgactgcatcaccagacgcatgggttgtttcaggacgcggtgagcttcacctgtccattttaattgaaaacatgcgccgtgaaggctatgagcttcaagtgtctaaacctgaagttatcattaaggaaattgacggcgtcagctgcgagcctgttgagcgcgtgcagattgacgtgcctgaagagcataccggttctgttatggaatcaatgggtgcgagaaaaggcgaaatgcttgatatgattaataacggaaacggccaggtccgcctgatctttaccgtaccttcacgcggactcatcggctattctactgagtttctgtcactgacacgcggtttcggtatcctgaaccacacgtttgacagctatcagccgatgcaaaaaggccaagtcggaggccgacgtcagggtgtgctcgtttccatggaaaacggaaaagcgacatcttacggaattcaaggtattgaagaccgcggcgtcatcttcgttgagcccggaacagaagtgtatgaaggcatgattgtcggcgaacataaccgtgacaatgaccttgttgtcaatgtcagcaaaatgaaacagcagacaaacgtacgttccgctacgaaggatcaaacgactacgattaagaaagcgcgcattatgtcgcttgaagaatcactcgagtacttaaacgaggatgaatactgcgaagtaacgccggaatccatccgtttaagaaagaaaatcctgaataaaaacgaacgtgaaaaagcggcgaaaaagaaaaaaacagcaggaatgtcttaatcacttgcagaatttgaaaaggtagaacccgaacggaaaaggggagggggatctttttgaatgaagtaagtgaacggctgtcgttctttgcggctctttaccaagtggatgagcatccgctggcgggaatgtggctgttatacggaacgatcgtcgtgctttcggtgattgtatttaaactcggctttgccaaacggctgccggttttgaaggctgcggcagtttatctctttctcgtgctcggctgcaccgtgctgacttttttcggtgtgtttttgccggtcggagaagggcttgttgtcgccgccttgattttgatcatttacaaaatccgtctgcaccagtccaaaaaaagccagtcagctaaaccgcaataaaaaaatgaccttgccttccggcgggtcattttttattgcggtttattttttcagtttatcttttttcgctttttgtccaggatgaaaggaaaagtgtccggtattcagccgcgcctccgttttgattttgattcggtcatggcattcccggcacatatatgtatgaatcggacgattgcggaggcgtttggctgtcagtgtttcatcatcaatttgttcaattttgtcgcaaatggaacattttactctcattgattttcacctctttcactatgacaagcattatatcatggatgcccctcctgccaaagggaaagaaagcagcgcccttcttttggagcgggcgctgctttttactggcggtttttcatatgatgatccgattgatcgttctgttcgttctgcagcttgttctggtctctttggttcagctgatcatcattcgattgagtcggtgattctttttcattgtcggtcacatcattcgggacttccggcatgacacgaccgacgatggcggcaagttcgtccaaaatgcctgaaacggggcggccggctttaatgtcgctgcccatgcctctcagacgggaaaccgtatcaggatcagccacgacaacggcattggcgccgtaaggatcgttttttaacgcctgggcgaccgtgtatttaatgctctccactttgcttctttctaaattgtcatccacatcgattccgacaacggagtatcttccgagtacaaccgcggtggcatctgaaatgccggggattttttcggttacctcgacgagatgcttagcgatgtctgtccggccgggattttcagctgtctcaggagccgtattttttacatgaatcggttttgcatcacgctgatcggttgattcgttctggatattgcggccgcggccgtcctgtacagcagtgcagccggtcaggataaacaaggcttgtatgataatgaaaagaattcgcacgtcagattccctccttgaatgctttcatttattttattgttgaattaaccttctatctttattcaccaaatcatatattttagcaggcatccccgtttttcgcggaaagagaagcacacgatgggctttgatccttatttcaggaggctgagacttgagtaaaatttatgtgttagatacgaatgtacttttgcaggatcctaacgccattttttcctttgaagaaaacgaagttgtcatccccgccgtcgtgctggaagaggtcgattcaaaaaagcggtatatggacgaggtcgggagaaatgcgaggcacgtatctaagctgatagacgggctcagggagaaaggaaggctgcacgagaaagttccgcttcaaagcggaggaacgctcagaattgaactgaaccaccggtcatttcatcagctccaagaaatttttatcgaaaaaacgaatgataaccgcattttggcggtggcaaaaaatttaagccttgaggaggaaacgaaagaaaacggccgcctcgtcatcctggtcagcaaagatgtgcttgtcagggtaaaggcggatgccatcgggcttttggcggaggactttttaaacgacagagtcgttgaccatcatgaaatatatagcgggtacaaagatatatttatgaataaagagcggtttgcctcgttttataaaaacaaacaaattccagtcaaggagcttcagcagcatcaggtttatccgaatcaatttgtgctgatgaaagatgaattaggaggatcttcgtctgcggtcggcatggcggataagaaaggagagaccgtaaaaagactcgttttcgatgatgagcacgtatgggggatcaggccgaagaacgtccagcagacaatggcgctcgaactcctgctgagggaagatatcccgcttgtcaccctgatcggaaaagcgggaacgggaaaaaccttgcttgctctcgcggcagggcttctgcagacggaggatctcggtatttataaaaagctgatcgtcgcgcgtcccatcgtcccggtgggaaaggatatcggatatttgccgggcgaaaaagaggaaaagctcaagccgtggatgcagccgatctttgataatcttgaatttttattcaatgcgaaaaagccgggtgaacttgaagcgattttggcaggaatcggatcgattcaggtggaggcgctgacatacattcggggaagaagcattccggatcagtttattattatagatgaggctcagaatctgacgaggcacgaggtcaaaacgcttttgacaagggtgggagagggcagcaaaattgtcctgatgggcgatccggagcaaatagatcacccatacttagacagtttaaacaacggacttgcttatgttgtagagcggtttaaaggacaaaccgtctccggcagcgtgaagcttgtgaaaggtgagagatccggccttgcacagcttgccgccgatttgttataaaacttcgatttctgtgacgcccgttatcggtttttcaaagtctccgtccacgtaaaaatggaccggaccgccgtcttgaagcggtttccccgcatcgctgaaatgcgcgattgcgtccatcgccttttcaagcggcacttcggttctttctgattttgaaataaatgcgcacaggacagcgctttctttcggctcggcatttgctaaaacagcgccgagcttcatggcgaagctgccgttcatcagtctttctttttcataacgtttttcactttttaaagtcggcggcgaaatgcgcccttctctgatcacccgttcaggatcaagcgtatgctcctgggtttctgcagagccgtcctgatgaacaggctgattgttttcaaacggaaatttgcggtcatcgaaaatccagacactcggatcaattgtaatcgggtatgtaacattgccttttacttgaataacgctcatgttgaagcccccctttacttaaagtataaaagttttcgcatgaattgtcactttgcgttgcaaattagatgtatacaacggcagcgaagtgaggatgatcgacatggtatgccggcattaccaagagctggacgcattagttcaggaagcgaaaaaaagaaccggagaaggcaaagtggcagactatattccggctctggctgaatctgaacaagacagcctttcggtcacgatttatcatgcggaaaatacatgtctgacggcaggagacgccgaccggacatttacgctgcagagcatttcgaaagtgctttctctggcgctcgtactgatggattacggaaaggaaaaggtgttcagctgcgtgggtcaggagccgaccggcgacccgtttaactccatgattaagcttgaaacagtgaatccgggcaagcctttaaatccgatgattaatgcgggagctctcatcgttacgggtttaattaaagggcattcgccgaaagaccgcctggattacctgctcggattcatcagaagacttgcgaacaatcaggacattacatattgcagacatgtcgcggaatcggaattcaaatcttccatgattaatcgggccatgtgttattacatgaagcagtatgacatttttaaaggcgatgttgaagaggtcatggatttgtatacaaaacagtgcgcgattaagatgagcagtctggatttagccaaaatcggctgtgtattcgcccttgacggcaagcatccggaaaccggggagcaggtcattaaaaaagatgtggcgagaatctgcaagacgtttatggtgacatgcggcatgtacaatgcgagcggggaattcgcaatcaaggtcggcattcccgctaaaagcggcgtttcgggaggaatcatgggcatttcgccgtacaacttcggaatcggtatattcggcccggcgcttgatgaaaaaggcaacagcatcgcgggtgtgaagcttttggaaatcatgtctgagaaatacaggctgagtattttttgaaacattttttatcataacatctgcttaaatcctcttgcaatttcatctgataccctttatgataaatagaagaattaggtactcgcctggggaacggagggatacttttggcttcagagattatagttgaccatcagcagaaagcattcgagctgttgaagttagatgctgagaagattttgaagctgatccgagtacaaatggataacttaacgatgcctcaatgtcctctgtatgaagaggtcttggatactcagatgttcggactgtcgagggaaatcgattttgctgtccgcctgggattagttgacgaaaacgacggcaaagagctgctggacagacttgaaagagaactgtctgctttgcatgacgcgtttacaggaaaataaatgatcaaactcaaactattcaacggtttgggtttttttataaccgtaaaccgtttttttgcatcttcttttcgtaagacggtctcttaatctgcatttcatccgaaaaactataaagaaactgcgtaaattgtttatgaattatagtaaaatataatacgcaataggtattaaacgtaagctttaagcaggaaagaggatgttatgtttaaaagaatgttaaaatcttacgattattcattgatatgcgctatcattctgctgtgcagtttcggattggtaatggtatacagctcaagcatgattaccgccgttatgcgttacggcgtgagcagcgactatttctttaaacggcagctgttcgccgtcatcgcggggtttgtgctgtttattatcgcggccgtttttccgtacaaagtgttcgcccatcaaaagattcagaaaatcatactgcttgcgtcagtggctgcgctttgcgcgctgtttgttttcggacatgttgccggaaatgcgcaaagctggtttaaaatcggcggaatggccattcagccgggggaatttgtcaagctgaccctgatactgtatcttgccgcggtgtacgcaaagaaacaaagctacatcgatcagcttttgacgggggttgcgccgccggtgatcgtcaccgtagtcatttgtgcgcttatcgctattcagcccgacttcggaacggcgatgattatcggtctgatcgcgttttgcgtcattatgtgttcgggattcagcggaaggaccctgctcaggctggttctcatggcgggaatcgtattactccttgtcagcccgatcatttatctgaaatgggacgatattttgacacccgggcgtatgagccggtttgaaagccttgaaaatccatttaaatacgccagcacatcaggtctgcagattataaattcgtattatgcgatcggctcaggcggttttttcggtctcggtcttggagaaagcattcaaaaatacggttatctgcctgaatcgcatacagactttattatggcggttatttcagaggagctcggcattttcggcgtcctgtttgtcattgtgctgctggcttttgtggtgttaaaaggtttttatattgcgagaaaatgtgaagatccgttcggaagccttttggcaatcgggatatccagcatgattgcgattcagacctttatcaatctcggcggtgtcagcggtttaattccgatcacaggtgttccgctgccgtttatcagctacgggggatcatcaatgtttttgttattgacgagcgccggtatattggtgaatgtcagcatgcatgtcaagtactcagaaaagaagaaaaagagggagcccgttccgtctaaaggggtaaaaagacggcagacggaaaaatctgtgtatctctaaaaaacaagtgtatacacagggcggatattcctttattataaactacatatttattaggccaagggggagaaaagtttgtcacaacaatccatccaaaaagtgttagtagcaaacaggggagaaattgcgatccggattttccgggcgtgcacagaattgaacatcagaacggtagccgtttattcaaaagaagattcgggctcctatcatcgctataaagcggatgaagcttatcttgtgggcgaaggcaaaaaaccgattgacgcgtatcttgatattgaagggattattgagatcgcaaaaagaaacggcgttgatgccattcatccgggctacggatttctctctgaaaatatccaatttgcgagacgctgtgaagaagaggacatcgtattcatcggaccgacgtcagcgcatttggatatgttcggagataaggtaaaggcgagggagcaggcggaaaaagccggtatccccgttattccggggagtgacggaccggctgaaacattaaaagatgtcgaacaattcgcaaaagtccacggatttccgtttattattaaagcatcgctcggaggcggaggccgcggcatgagaatcgtccgaagcgaaagcgaattgaaagaatcgtttgagcgggccaaatcagaagcgaaagccgcattcggaaatgatgaagtgtatgttgaaaaactgatcgaaaatcctaagcatattgaagttcaggtgatcggagataaagaaggcaatgtcgtccatctgtatgagcgggactgttccgttcagagacgccatcaaaaggtcattgaagtggcgccgagtgtatctttgcagcctgaattaagggacgaaatctgtgaagcggctgtggcgcttgcgaaaaatgtcggctatatcaacgcggggaccgtggaatttctcgtagcgggcggtgaattttactttattgaagtgaacccgcgcgtacaagtggagcatacgattacggaaatgataacgggggttgatatcgttcagacgcagattctcgtcgcgcagggccacggactgcacagccgcgccgtcaatatcccagagcagaaagacatttttacaaacgggtatgcgatacaatcacgtgtgaccactgaagatccgctgaatgactttatgcctgacacgggtaaaattatggcttaccgctcaggcggcggtttcggcgtccgccttgatacgggaaacagcttccagggcgccgtcatcacaccttattatgattcactgctcgtcaagctgtcgacatgggcgctgacgtttgaacaggcatcagcgaaaatggtccgcaacctgcaggaattcaggatcaggggcattaagaccaatattccgtttcttgaaaacgtggcaaagcatgaaaaattcctgacgggccaatacgacacatcgtttatcgacacaacgcctgagctgtttgttttcccaaaacagaaggaccgcggaacaaaaatgctttcctatatcggcaatgtcacggtgaacggttttccgggaatcgggaaaaaagaaaaacctgcatttgataagcctcagaccgttacgttagatatcggggaaaagccggcaagcggtacgaaacagattcttgatgaaagaggcgccgagggacttgcagactgggtgaaagagcaaaaatccgtgctcctgaccgatacaacgttcagggatgcccatcagtccctgctcgcaacacggatcaggtccaacgatttgaaaaaaatcgcgaatcctacggctgccctgtggcctgaactgttcagccttgaaatgtggggaggcgcgacatttgatgtagcgtaccgtttcttaaaagaagacccttggaaacgccttgaagatctccgtaaggaagtgccgaacacattgttccagatgctccttcgttcatcaaatgccgtcggttatacaaactatcccgacaatgtcattcaaaaatttgtccggcagtcagcggagtccggtatcgacgtattccggatctttgacagcctgaactgggtaaaagggatgacgctggccatcgatgccgtccgtgaaaccggaaaagtggcggaggctgcgatttgttacacgggagatattcttgataagacccggacgaaatatgatttgcaatattatctttctatggcgaaagagcttgaggcgtctggtgcgcacattctcggcattaaagacatggccggtcttttgaaacctcaagccgcatacgaacttgtctcagcgctgaaggaaacgattgatattcccgttcatcttcatacgcatgatacgagcggcaatggcgtctttctctatgccaaagctgttgaagcgggtgtggacatcgtggatgtcgccgtcagctcaatggcgggtctgacttcacagccgagcgcaagcggattttatcatgcgcttgaaggaaacagccgccgtcctgaaatggatgtccggcaggtggaaagactgtcacaatattgggaatccgtccgtcagtattacagtgaatttgaaagcgggatgaagtctccgcatactgagatttataatcatgaaatgccgggcgggcagtacagcaatctgcagcagcaggcaaaaggagtcggcctgggcgatcgctggaatgaggtgaaagacatgtacagcgttgtcaaccgcatgttcggcgacgtcgtgaaagtaacaccttcttccaaagtcgtcggagatatggcgctttacatggtgcaaaacaatttaacagaacaagatgtttatgataaaggcgaaacgcttgattttccggattcagtcgttgagctctttaaagggcagatcggtcagccgcacggcggatttccggaaaaactgcaaaagctcgttctgaaaggacagacgccgatcacggtaagaccgggtgagctgcttgaaccggtatcttttgaaggcattaaagaagaatggaaagaaacgcatcagatggaattgagtgatcaggacgcaatcgcgtatgctctttatccgaaagtatttactgaatatgttaaaacggctgaacgcttcggtgatatttccgtattggacacaccgactttcttctacggcatgacactcggtgaagaaatcgaagtggaaatcgagcgcggaaaaacgctgatcgtgaagcttgtatctatcggtgaaccgcagccagatgcgacacgtgtcgtttatttcgaattgaacggccagccgcgcgaagtggtcattaaagatgaaagcattaaatcgtccgtacaggaaaaattaaaagcagatcggacaaacccaagccacattgcggcatccatgccgggaacggttattaaattgttaacggaaaccggggcaaaggtgaataaaggcgatcatctgatgattaatgaagcgatgaaaatggagacgacggtacaggcgccgttctccgggacaatacagcagattcatgtgaaaaacggtgaaccgattcagacaggcgatttactgatcgaaattgaaaaagcgtaaaaaataaacataaaaaacctgatccgccccgtgtgcgatcaggttttttatatgtgaaaaggccgaagctttgatgcttcggccttttcatgtgcctcagatgttccgctgttttgattcatagcggaagcgggcgattaataataagaaatagcataagacaccgaacagaccggcaataaagagcgaatgggcaagtgcaaagccggtggccatttctgaataaacaaccatgattccggagagcgcctgtaatacaacaaaggcaagagccgctatccagcccccaagaatctgtttttggtctttgtaggagcgcaccgcatgcgcaaaagcgacaagaatccatacgaacagaagcagcgctgccgttctgtggcccatctgcacccactcctgaaaatgagacggaagtccgtggttcagtctgctgcaaagcggaacgtcaggacaggcaaggcttgattttgtatggcgcacataagcccccgtataaacgacgatatacgtgtaaatcgaaaggccgatcatatgaaactgcattttcctgccgattctgagcggcttgacgagctttttgtctgatttatcagcttcaaatatgagcagcgtcaaaatcagaacagaagcgaaagaaatcagcgatatgccgaaatgaagcgccataacgagcgcatttgatccgaaaacaaccgctaatgcgccgagaagcgcctgtaaaaataaaaagataatggacataatggcgagaaaggttgtttcacggaaaacaggcgtgacttttctccatgcccaaaaagcgagactcagcacgagaacgattgagacaccgcttgcgagtctgtggctccattcaatgatagaagcggcgttaagctccgggaaaaaccggccgtggcaaagcggccactgccttccgcatccgagacccgatcctgtttttgtgacaagagcgccgccgatcagcacgacgagcataacgaacgtcgtcagcacgccgagcgctttcaaagctttattcattttacattcaccttcttaacaaactggacaaaatgatatacgtaccaagtgtaagcgaatatgtgttttgtggcaattctcaattctgtttgttcacaaaaatataatagaatcaggacttcttagataatggggttgattattccagatgggtctgatagaaataaagtaaccgctttattatgaagccggcggatttggtaaaattcataaaaagttcacaaataaattcctgtttctcgtttaatatttaagaggatgtttttttacaggtcattatcttgtatgatagagttgcaggtcttaaaaaacctgctttaggtttgtaagggaggtttacgttatggctaattccagaattttaaacgatacagctatagacggacagattgaagagacgacggcatggaaggatttcctttcgcttatcaaaataggaatcgtcaattcgaatttaattacgacttttaccggcatgtggcttgcgttacatatatccggtctgagttttttaggcaatttaaacaccgtgcttcttacattaataggatcttctttgatcatcgccggttcttgtgcggttaacaactattacgaccgtgatattgatcatttaatggaacgcacgaaagtaagaccgacggtaaccggaaagattcagccgaatcaagcgctgtggtcaggaattttactcattgctttaggacttatcatgcttttgatgaccaccgtgatggcagcagtcatcggttttatcggcgtgtttacgtacgttgttctttatacaatgtggacgaaacgccgttatacgattaatacggttgtcggaagtgtatcaggcgccgtgccgccgttaatcggctggacagcggttgaagggcacatcggtgttgtcgcgtgggttttattcatgattttattcatctggcagattccgcactttttagcgcttgcgattaaaaagacggaagattacagagcagcgaatattccgatgcttccggtagtgcacggctttgaagtgacgaaaagacagattatcgtctgggtcgcatgcctgctgccgcttccgtttttcctcggcagtctcggtcttccgatcgtcattctcggcactttgctgaatgtcggatggcttgttctcggactgatgggattccgcatgaaaaacatcatgaagtgggcaacccttatgtttgtctattcgcttaactacatgaccatttattttgtagcgatggtggtcttcacgctgttttaattgaataatgagcttgtttgatcgccaaaacaaacaatgacaactagtaaacgccgccttgaccttttgtttaatcaggcggctttgcttttatacatagatggaattttaagtaaaaaatctcatattttaagaaatgaggaaatgaagtatttcggctggaagcagatttactgcttgtgcatctcgtactgattcaaaaaaggggttgggtgaaatgttaaagcgttggcgtcttttatcattattagccttagtgccgcttttattgagcggctgtggaaaaccgtttctgtccacactcaagcctgccggcgaagtggctgataaacaatatgatctgacggtgctcagcacacttatcatggttgtcgtcgttgcggtcgtagcagttattttcttttacgtcattgtgagattcagacggtcgcgtataggggaagacacgataccgaaacaggtggaggggaaccgttttttagaaatcacctggaccgttattccgatcctgcttctgattattcttgtcattccggttgtcatcgatacattggcactggcggatacgtcgccgatggataagaaaaaccgtaaagcagaggatgcgctcgtgattaatgtaagggcgaatttatactggtgggaattcgagtatcccgattacgggtttgtgacaagtcaggagctgatcgttcccacagatgaacgcgtctatttcaagctgaagtcctcagatgtgaaacactctttctggattccgtcagccgggggaaaaatcgatacgaatacggataatgacaacactttctttctgaccttcgattctaaacgcagcaaagaagcgggagaatatttcttcgggaaatgcgcagagctgtgcggaccttcacatgcgctgatggatttcaaagtgaaaccgctgccgtcaaaagaatttaaacaatggacgaaagcgatgaaaaattataagcatacaacagattccgatttagcagcacaaggagaagagctgtttaaggaaaaaaactgcctgagctgtcatgcggttgagcccaatgataaacgggctgaagcggcaagaacggctccgaacctcgctaccttcggtgaacgggtcaaagtggccggcattaaggatgcgaataaagagaatataaaagcctggctgaaaaatccggacagcattaaaccgggcaataaaatgacaggcacttatccgaagctctcggacgctgaaacggatgcgctgtatgaatatttaaaagggctgaaagcggagaacaagtgaggacagggagatatcagggggaggtcgcaaatgatgaatacgcttacaggacagcaaagaaaaagctctttgctttgggattatttgacgacggttgaccataagaaaatcgcgattttatatatgatcgccgggggatttttcttcgtcgtcggcggacttgaggccatgcttatcaggattcagctcttgaggccggggaacgattttatgggtgctcagcagtttaatgaaattatgacgatgcacggcacgacaatgatcttcctggcggcaatgccgctgttattcgggctgatgaacgcggttgtgccgctgcagatcggggcgcgtgacgtatcattcccatttttgaatgcgctcggattttggctgtttttcttcggaggcatctttttgaatctgagctggtttttagggggcgctcctgatgcaggctggacgtcgtacgcgtcgcttgcgctgaattcgaaagggcacggcatagactttttcgtgctcggcctgcaaatatcaggcttaggtacgctcattgcggggatcaattttctcgccacgattattaatatgagggcgccgggtttaacgtatatgagactgccgctgtttacgtggacgacatttgtggcgtcggcactcattttattcgcatttcctccgctcaccgtcggtttggcgctgatgatgctggatcgtttgttcggaacgaatttctttaatcctgaattgggcggcaatacgataatctgggagcatctgttttggattttcgggcatccggaagtatacattttaattcttcccgcctttgggattttttcagaaatcattcccgtatttgcgaggaaacgtctgttcggttattcgtctatggtctttgcgatcgtgctgatcggctttctcgggttcatggtatgggttcaccacatgtttacaacgggactcggaccgatcgctaatgcgatatttgcggttgcgacgatggcgatcgcggtgcctaccggcattaaaattttcaactggcttttgaccatctggggaggaaacgtcaaattcacgacgcctatgctgtatgccgtcgcctttattccttctttcgtactcggaggagtcacgggtgtcatgctggcggccgcagcggcagattatcagttccacgatacgtattttgtcgtagcgcatttccactacgtcattatcggcggcgttgtgttcggcatcctggcgggcgtgcatttctggtggccgaaaatgttcgggaaggtgcttcatgaaacgatggggaaaatttcgttcgtcttattttttatcgggtttcatcttaccttcttcattcagcattttctcggcttgatgggaatgccgcgccgcgtttacacatatctgcccggccaggggcttgataccggcaacctgatcagttcaatcggcgcgtttttcatggcaggcgcggccgctttactcgtcgtcaatattatttatacctcaataaaggggaaatacgtcgggaacgacccgtggctggacggtcgtacgcttgaatgggcggtctcttcgccgccgccggaatataattttaaacagcttccgtttgtccggggacttgacccgctgtggattgaaaagcaggccggaaatgaagggatggcgcctgcagagcctgtagaggacattcatatgccgaacggctccatcatgccgtttatcatatctttcgggctgtttgtggcagcgttcgggtttttataccactccgattattcatgggggcttccggttatcttcatagggctcggcatcacattctttaccatgctgcttcgctctgtggtcgatgattacggctatcatattcacaaagaagatctgccgaatgatgataaaggggtgaaggcgtaatgcagctgcaggaaaaaatgacggctgaaacctttccggcttctcctgaaaaagcaacgctggaggggaaaaataagtttttgggattttggctgtttctcggcggcgaaacggttctgttcgcctcgctatttgcgacattccttgctttacgggaatctaaagccggagggccgtcaacggctgagatgtttgagctgccgatcgtgtttatcgcgacgatgcttcttttgacgagcagcttaacgagtgtgtatgcgatgtatcatatgaaaaatttctcctttaaaaaaatgcaggtgtggcttctggttaccgtattattgggagcgggatttttaggggttgaaatctatgaatttatgcattacactcacgagttcggatttaccattacaagctctgcgctcggctcagcgttttacacgctcgtcggcacacacggagcacacgtggcgttcgggctgttgtggatcagcgcgctcatgatccggaatgcgaaaagagggctcagcctttataatgcgccgaaatattatgtggccagcttatattggcattttatcgatgtcgtgtgggtctttatctttaccgttgtatatttgatggggatggtgggataacgatggacgataacaaaaacagagagactgtcagtacggatcttgaatatcggagaaggaaaaatgccgaggagatgaaatatcaggtcatctccttcggcttgatgatcggccttacgcttgtcgcgtttttgacggtggctgcagacggcattgccggatggtttacgatgccgtttctgatcctgcttgcggtcattcaggtcatctttcagctgttttactttatgcatatgagccagaaggggcatgaagcgccgtcattatttctgtattcgggaatatttgtcgcgtttatcaccgtgcttgcatttgtcacgattatttggtggtaatcggggcggcggggagtgagagatttgattaatttggaaatgttcgggtttcgcgcaatgtggagcccgtatctgttttgtataactgccgtgataacaggtgtttacttttactggtgcagccggcataaaggacgtgtggccgttaaggagaaggtgctgtttgtgctttccgcgctatttttttacgcggctgcgggaagtccggtcgatttattgggccatgtgatgttcagcgcccatatggcgcagatggcggttctgtttttagtcgtaccgccgctgttgatctccggaattcccggctgggcatggaaaaaactgatcttccgtcctgtcgtaaagccgctgttttcatttttttcaatgccgcttatcgctttagtgctgtttaacggtattttttcgctgtatcacatcccgtttatatttgatttcgtcaaaacggattcgctgtatcacacgctgatgaacggactcatctttgtaacggcgttttttatgtggtggccgcttgtgcataaggtggacggtctgccccgtctcagcggtttaatgaagctggggtatattatggcggacgggattttgttaacgccggcctgcgcgctcattatgttcagcggggcgcccatgtatgccacgtatacagatccggcggcttgggccgaagcaatgaagctttgcgttcctttagatttgctggaggagatccctttatccgggccggagatgtttaacacgctacctcctctggaagatcagcagcttggggcagtgctgatgaaaatcattcaagaggcggtctacggaatatatttggctgtcatcttttttcagtgggtcagaacggaacgggaaaaagatacgctgtcagagccgccgtatatcgagcataccgtctcataaaaaaaagtacagcagaatatgctgtacttttttattacatttgcactgtttttaatgactcttccaattcaagcagtaaagctttgctttcagcgatgacatgttccggaaattcttcagcgctgccgtattctacgccgtgcggataataatgctttcctaaaagaggggccttcagctgaatcacggcccgtctgccgccgacatcgccctcttttgccgttccttgaatccgcagataaaatgtccctcaggtactgaaaactttttgtcgtaagtcactctttcataatcccattgtccagccagaatgagccctttgccttccatcagatcgttcaagcggctgagctccgctgttaccccttcaagaccgctgttttcaaacttcaaaccttccccctccttttaaaaatgccctttcctgacaatcatagtatgaaagcgttacactttcaatgattcatacggtgaaagtatgcaaaaacaaaaatttgacgacaatagtagcagaaaaaaggaggaattccgcaatgacaaagatcaataagctcatgacgtcagacttgcaatattgtacagtattagataatgtatatgaagctgcggtgaagatgaaagacgcggatgtcggcgccattccgatagtggatgaagacggcgccacacttgtcgggatcgtgacagacagagatctcgtattacggggaattgcttcaaaaaagccgaactctcaaaaaataaccgacgcaatgacagagcgggttatcagtgcagaagaagacgcctctgtggaggaggtgctccatttgatggctgaacatcagctcagaagaattcccgtcacaagggataaaaaactggtcggcattgttacgctcggcgatctttcgttggccgagcaatcaaatgagcaagcaggccgggcgctgtctgacatttctgaagacggaggtccggaggggtttatccattaaacataaatcacggacgatgcaaataggctgtactgtataagagtacacaaaaacagaacggtttgatgatatggggtgagaggttgaaaaatattgcaagggctctcgttatccttttgcttatttacggagcgtatgttctgtttatacaatatggatcggctcctcagaaaaagaccaatcaggaggagcctcaggtttccaatgaagaagagagcggaaaacggctgaaaatgccgtcatccggactgctttctctcatggggaaatctgccgccgatgtgaaaaagaaacttggggaaccgtcccggaaagatccttctgcctacgattacgagtggtgggtgtacaaccaggggaaagaccaatacgtacaagtcggtattttgaatgataaagccgtgactttatacgcttcgggaagcggcatcaacgcaaaaccgtttaagatcggcgaatcgacgggcgaagtttttaaaacgacgcaggtttctccttttgtcaatgtgactgacaagggaaacacgtatcggtttgagttttccgaagaagatatcaatacccgtcccaccgtcaagataggcggaatgtatgttcagctgtacatggacaaatttgacgggaatctgtcaagcatcagggcttttgatgcggaaacgctggtgaaacaaaggccgtatgaggtcatgtacagaggaaagctgacagaacccgagccagtttctgataaaaaatggaacgacattgaacgagcgagtgaacagcagattctcgacattacaaatgtcatccgcgtgaaacacggactggcaaggctgaaatgggacgaaggcgccgcgaaagtggcattcggccacagcaaggacatgaaggataacaagtatttctctcacgtctcaaagaaatacgggactctgaaggaccgcttggaaaaaggcgatgtgaaataccgggaggccggtgaaaatattgcctacaactatgtggacggtcctgcagccgtggagggctggctgaacagcgaaggccacaggaaggcgctgttaagcccggattatacgcacctcggtgtcggcgtggaccggaagtattatacgcaaaacttcattaagccttggcagtaaaaaaccgcagaggggcgcgtcccccgcggtttttttatgatttttcgcgagcggcgctcctgctgaaaaaaatatacctgctttttttcgcaatttaggcgaacattaaggcgcatgaaccgatacattatagcaggcaaaacttttcggagggggtgagaattgtggcgaatcagcaatcacggcaatcaatcgatgattttaaacaattcgtaaaaaagcatcccaaactgatccaaaatgttcgcaaggaacaaagaagctggcaggaagtctatgaaaactgggttctcctgggcgaggatgattcgatgtgggacccttttaaagacgaggccgttcagccttcttccgacgcggaaaccaaacaggaaccagctgaaaagaacgatttcgtttcaaaaatggtcactgccgtcaaaaagatggatatcaaccaaatgaatgagcagatcaataaaatgagccagtccatttcatcattgcaaagccttttaagccaattttcggggagcagcacgaagcagccccggcaaggctccggacaacatcctttttcattcagaaaggattaaagaaggggatcgtgtatgcgaaaagaggttcaggaattcatatccgcagatgaggaacggaaacggtttatacggcagcgtcccgtctggtaccgcagacttgcgagaaaaccggacgatctcaattcctttcagcttgacatgatgaatttttatgaaaagacgataccgcatcgggtaagtcaattctcaaacgggattcaaatggcgcagatgatgatgcagatggtacacgccatgcgttcgcaggattaaaaagcgtttaaacgccgcattttccaattgggtggtttcatggtaaactagcaactggaggtgcgtatttatgtatgcaacaattgagtccgtcaagcttcaaagtgaagcggaacagcttgccggcatgattctgcagtctgagacggctgaaaattaccgcgattgttacaagcgtctccgtgaagatgaagaggcagggcggatcattcgttcttttatgagcgttaaagagcagtatgaggatgtgcagcgctttggcaaataccatcctgattatagagagatttcccgcaaaatgagagaaatgaagcgggagctcgatttaaacgataaggtggccgaatttaaaaaagcggagactgagcttcagtcgctgcttgacgagatcagcattgaactcggaacggccgtctcggagcatgtaaaagtgccgacggggaatccttattttgacggcctgtcatcctgcggcggcggctgcggttccggcggcggctgcggatgcaaagtttcctgacgagacggccgtctcgtcttttacataaaatgaacagaaagtcaggcgggtgatcatgatggaaaataagcgccaaggcataatcgtatatctgcattctttaaaacacagcaaaatgctgagaaaattcggcaacgttcattatgtttccaagcggctgaaatacgttgtgctgtattgcgatatggacctgatcgaaaaaacaatggaaaagatttcttcttattcttatgtgaagaaggtagagccttcttataaaccttttttaaagctggaatttgaatcaaagcttgataaagcgaaagagtacgattataaagtcggtatataaaaaaatccccgcagatacctgcggggtccttctattccttaacaagttaaggagaaggaaaagggagaggagaaaccggaggaagaacttatggggaaacgtaagtcttctccgcggttggcaacaacatcattcattgatgctgttacacgtagtcttgacaggaatgtgaatatgtatacacgtttttcacgttcattgtttgaaagaatgctttatgataagatagggattgtttttatacataacggctcagccgatgagaaacatcaaagttttcagaaaaagtggtgtgaataatgagagtaatttccggttcaagaaaaggacgagccttaaaggcggtgccgggcacatcaacaaggccgacgacggataaagtaaaagagtctatttttaatatgatcggcccgtattttgacggaggaacagggctggatttgtttgcggggagcggcggcctcgggattgaagcgctgtcgcgcggatttgaccgctgtatctttgtggatcgtgatttcaaagccatccaaacggtaaaagcgaatatcaaagcgctcgatctgctgtcttcatcggaagtataccgcaatgatgcagagcgggccctctatgccgcggcgaaacgggaaaaaggttttgacggaattttcttagatcctccgtataaggaacaaaagctgaaagcgcttatcgaaatgattgatgagcagaacatgctgaatgaagacggttttgtcgtagccgagcatgataaagccgttgtgcttcctgaagccgtcggcgcgctttctgtaacaagaagggaaatttacgggcttacaggagtgacgatataccgaaatagggggtaatgatgtggcaagtatagctgtatgtcccggaagttttgatcccgtcacctacggacacctggacattatcagacggggggcaaacgtgtttgagcaggtgtacgtatgcgtgctcaataattcttctaagcagccgctgtttacagtcgaggaacgctgtgagctgttaagagaagtgacaaaagacattccgaatattacggtcgagacgtcacagggactgttaatcgactatgcgaaaaaaaagcgggcgaaggcgattatcagggggctcagagctgtttctgacttcgaatatgagatgcaggggacttccgtcaaccgcgtgcttgacgaatcaatagaaactttttttatgatgacgaacaatcagtactcttttttaagttcaagcatcgtaaaagaagtcgcaaaatataacgggcctgtttcagagtttgttcctccggaagttgaacaggcgctgaagcagaaatttaaaggatgagaagcgctgatcggcgtctcatcctttttttgtccgtgctgacagcctgtaacaataaatcaatgcgtatacggcgagagctgtcagcgtgatggcgggcccggtttcaacaagtgtattccatccgctgacggcagcagatcccgcgtcctgatcgcggaaagggaggaatacggactggtaaggttcgtccaatgcaaggtaaagcggcttccacagtaagagaataaagagtgcggcataaatgccctgaaggatacgcgccgcgaaaaacggtttaaagcggatatctgtttccgataaaatgccggctacctgggcctgtacggaaaggccgctgaacccgagaataaaactcacaatcatggctttcggcagcaaggcggcatcagcttcactgaccagcttgctcccaagtgtaatttcaaacattccgctgataagagggatgtccagatttgccggaagatgaaaaagggaaagcagcgcgtttgtaaatacagaaagcacatccatgacttgtacgattgataataaccggctgaaaaccgaaaacaatataataaaaccgcccaccatcagcaaggtttgtacagaagaggtgacggcgtcgcccaaaatttttccgagcggccgcttttccgaaagccgcgccttgtggagggccagaaatgcttccttcagagaagggagagcgatcgtctttttaccggtatacgccgcttcttctttccgtccgtatgaacgcatcgtcaggccgacggcgatgtttccaagatagtgagccgatgccagcagaatgccgagagacgcgttatgaaaaaagccgaccgccacggcagcgaatataaataacggattggatgaattggtaaaagagacgaggcgttcagcctctactctggagatttgtttatcctggcgcagccgtgcagtcagcttcgcgccggccggattgcctgaagccatgcccatagccagtacaaatccgccgacccccggcactctgaaaatgggacgcataaagggttcgagtaaaaggccgacaaatttgacaatgccgaatccgattaaaagctcagatagaataaaaaacggaagcaatgaaggaaaaacgacctcccaccacatggaaagaccggttttggaggcttcgaatgaggcctgagggtgtgaaataaccgtcgccgtcaaaaaaatgaaaaacaatgaaatcaaaaatgtatgaaacttagacaaattcattcttacctccccgatgctaaaattgcacactgacatttatatcatgataaaatatagaacagaccttaaaggcggccgggcaagtacctatttgtcatcctgtactaatatacgagcataggggttcaatttagaccatagaattcatgtataggatgtctattagggggttcgtcgcgttggccaaacctacaatcgggttagcgttaggttcgggaggggcaagaggcatcgctcatctcggagtgttatccagtttacataagcatcagattccaattgatatgattgccggcagcagcatgggagcattagtcgggagcttttatgcggccgggcatgacgtggctacgatgaaaaaagtcgccaaagcatttaagcggcggctgtatgcggattatacgatgccgaggctcggatttttaaaaggagaccgcatcaggcagctcgttcatgcctatacgtacggcaagccgatagaagaactgcggatcccgctcggcatcgtggcctgcgaccttcagaccggcgaaaaactcgtttttacgaaaggttcagtatccgaagccgtccgcgcgagcatcagcataccgggcgttttcgtcccgcaaaaaatgaacggacgtatgttagtcgacggcgcggtggtcgacagaataccggtgtccgccgtaaaagacatgggtgctgatatcgtcatcgcctctgacgtatcccgggtgaaaaaaacggaaaaagcggcacatatttttgatgtaatcatgcaaagtatggatatactgcaaaatgaattggtccgtcaccagaccattgccgcagacgtcatgatccgcccttctcttgaatcattcagctcaagttcttttgccaacattgatcatatgatcacagcgggcgaagaagccgcagaccggatgatcggccggattaaacaagaaatagagaactgggagggctaactcatatgaaagcaaaacattttcgctgggtgtttatcatcctgatcttattaattgctgttacatttattaagcttccgtattacattacacagccgggagaagcatcagagctgagaccgctgattaaggtggacggaggctatcctgaaaaaggaagcctttccttgatgactgtcaaagtaggccccgccaatccgtatacatatctttgggcgaaagtgcatccttacgatgaaatcgtccctgatgaaagcataaaagaagagggcgaatcggactcggattatatgaagcgccagctgcaaatgatgaaaagctcccaagaaaacgcggtcattgccgcttatcaaaaagccgggaaacaggtgaaatactcatttaacgggattttcgccagctcagtcgtctctgacatgccggcaaaaggaaaaatagaggtcggtgataaaatcatcagcgcggacgggaaaacatacgaatccgctgaaaagctgattgattatatcagcagcaaaaaagcgggggagaaagtaacgtttcacattgaacgggacacgaaagaaaagaccgttgacattgcgctgaaatcattcccggacgacccgaaaagagcgggaatcggcgtcgcgttatatacggatcggaacgtgaaagtaaagccggatctccatttcagcattgaaaatatcggcgggccttctgcgggtctcatgatgtctttagaaatttacaaccagctgacaaaacctgacgaaacaaaaggctataatatagccggaacggggacaatcgacgtggacggcaaggtcggaccgatcggcggaatcgatcagaaagtcgtcgccgcagacaaagcgggaaaagatattttctttgcgccgaatcaaaacggagctgaaaattctgattacaaaaatgcggtaaaaacggcgaaagcaatcaagtccgatatgaagatcgtccctgtcgacaccatgcaggacgcacttgactatttggatcatctgaaagtaaaaagcacctgatacaggcaggtgctttttttacgcattcaaaaaacgctgttcgtcttcatcatagcggatcggcgcttgtgaaaattcctgtttctcaaaaaatgtgcgttcaggttcttttatcggcaggctgtaaacccgtcccgccagtatgtccagatccagagcgggatgagagaaagaagagagcttgctgacgagaggtgcggtaagctcttttttctttgccgacaggtacgcctgtccttttttcgtcattccgagaagacggatataaggagcgcttgaaggctgtaagagccgatgcatgtcctcctttttcgtccgtgtcagaatgtgcgtgttcatccgctgcagcctcgtccacgtgtatcgttttgttttcaatcgttccatcatttcgcgataggatcgggcttgtctgatggtgcgcagaattctgtgctcaaggccttcttccacttcatagattcggctcaattcttcagcggacagagtgctgaggctgtattttacatatgaaaaatagtcttcggtgctgtgccatatcccgtatgaatttctgtatgcctccagctcacgcgcagacgcttccgggagaaagctccttgcggccgccgttcctttttctatcagcgctttccggatgcttgttgcgctggctatccggctgttatctccgggaagctcggcgtcatgatactgggaagcgattctggctgtcgtataaggcttcatagcggaaccgaaggcgtgtatcgctctaacgtagtgaaaaccgagaatattgttcggcttggacaaatcgagcatgtcccgccctttgaatatgtgtgaaaaagcttttgaggcggcggccggatagctgagaccctttttcagctcctctttcagaatcaggctgcagtcatcttcctttcggctgaacgcttcagacgcttcaataaagggttcgatccgcccgttttcgctgccgaaaaacaagctgctgcatcctaaatgatgaagaagcgaaacgctgccgcgcgcgaataattccgctttttgtacggcatacatataagggagctcaatgacgatatccacgccgttttccagcgccatttttgtccgggcccactttgagacggcggccggttctccgcgctgcaaaaaagggccgctcatcaccgccgccgcgacgctgctgtccgttttgatttttgcttgttccgcatgatagcggtgtccgttatgaaagggattatattcaacaaccaggccgactgctttcatatttgtcccgcctttcttgctatgttttgcttcgtgtggtacatttgcaaatgaagtgcatattttagtccgtttcgtttagtgtatgcatagcctatccggctgtcaacgattgcatgacggcggcattatgctgtaaagaaaaaatattgacaaaaacattctgaaaagctataatcatgtttgttgctttcctgaggtgatacaaatgaaatggacgatttatcagcttcatcaaatggcgaaaaagagctttgaatttgatgaaacagttgagttaaatgagctgacaaaattgaattctgacatccgccgcatttctcccgtccgggtgaagggccgcgcggagattgaatccaagcaagtttcgtttgactttacgatttcaggcgaaatggttttgccgtgctcaagaactttagttgatgtgccgtatccatttacaatcgcgacaaaagaactgtttagatttcataagtcggatgatatagaagatgaggacgttcatattgctgaagacgatatcgtcgacttaactccgatcgtaaaagaagagattcttttagaaattcctatgcaagtcttttgtgaaactgaacaaaaagaaggagccgctccccaagtggggaaggattggcaagtgatttctgaggaagacaagaaaaatcaaatcgaccccagacttgcggatctgaaaaagctcttaacacaagatgatgaatcttaactctttaaggaggtgggaataatggctgtaccttttagaagaacttctaaaatgaaaaaaagattgcgccgtacacatttcaaactaaatgtacctggtatgacagaatgcccgtcatgcggagagatgaaattgtctcaccgtgtatgtaaagcatgcggatcatacaacggcaaagacataaatgttaaaagcaattaatgtatgaagaaaagcgcgggaatctcggttcctgcgcttttctttttttttgcccctccggcctgcttccgccgaaaaaattgtgagcgccagtagtctatctaatctatcagcggcatatgtatgaggtaaatgagcaaatatggagggagatacgattgacgataacgagacaagacgcgtggacgcaagatgaagatttgctgctggccgaagtggtgctcaggcatattcgggaaggcgggacccagctttccgcttttgaagaagtcggcagagcgctgacgagaacggctgccgcctgcgggttcagatggaattcttatgtcagaaaacaatatcagtcagggatagaactggcgaaaaaacagcggaaggaattaagaaagcagatcggggtgcattccgccaatctgccgggaaccgtcaaacagcctccgatccgcagggcggaaggagaaaaagagctgtccattgatgatgtcattttgtttcttcagcaatttaaagagtcgccggccgcagcggatgtgcgtcatgaaaaagaaaaactcacagaacagctgaccgcgctgcaaaaagaagtcgaggatctgcgtgaggaaaatgaaagcttgagaaacaagctggagatgacggaagaagattataaagcgttaattgacattatggacagagcgagaaggatggtcaattcaaaagaagacgacaggaaatcggcgcagagcctgtaaaatgaaccggcctgagggcggcggcccggccggttttttattatgccgtttctccggatgtcatttcaccgtccatatcgggatgccagatgtaaggattttctcctttatcacgcgccatatcatatttaacgggctcaaaattcatcttatcccagaattctgctgatttcatgcgtgaatttgtcctgatcggcattctgaaggattttgcaaaatcaacaagcgcttttccgtatccgttgttttgatagcccggaagaacctcaagcttccaaagttccaaaaagtcctgacgctgatcaaaatacggattcgcgcctccgtttacctgatataaactcattctcgccactagtttatccccgaagtaaatcccgtaaaaaggcgaggtgctgtcattttcaatgatattatcctgaagatcttcaagcatcgacagctcctgcatcccgtattccttaaaccttttaaattcttcgagtgtcttaaagttgatgagcaggcgctctattttcaacacaaactccccctttgttgtgttctaccattattgtaaacgctttaattgaaaattccaactataatatgcttgcctgtctttttgctcaaaacgaaattgaagtaatttgcggcggcttctgctatgataatatggaaaaatgcagatatagggtgtgacagtgtgaaaatcggaattatcggcggcggagcggtaggccttttatgtgcttactacttatcgtcccgccatcaggtaacagtcattacgcggcggacggagcaggctgatgcgattaactcaggcggtatacggcttttgaaagacggaatagaatgtacggcggcatgcagagcgcaaacaggcatcacttccggattcgacctcttaatcgcagccgttaaacagcaccagctcagtgctgtgctgcgggatcttgagacggtaaaagggacgaatgtgctgtttttgcaaaacggcatgggacacatacacgacattagagattggcatacggatcattcgctttatgccggcacagttgagcacggagcaaaaaagatatcggatcatgccgttgaacatacgggagcgggagccgtaagatggagtgtattcagcgcatcccggccggaaacgctcaaaagcatcttttccggcatgcaccgggattttcccgtatatgatgaaaacgactggtatcggcttttaacgggaaaactgatcatcaatgtatgcatcaacccgttaactgcattgctgcgcgtgaaaaacggagagctgttaagaaatgacgcttacaaaaaatatatgagaaacgtgtttgaagaagcggagacaatacttggcctcgccgatagagaaaaagcgtggaacaaggtttgcgaagtttgcagactgacggaaaaaaatcattcttccatgctcgtcgatatcatggcaggcaggcggaccgaggccgatgcgattatcggctaccttgtaaaagaagcggaaagccgcggattgccggccgttcatctcacgtttttacaccgcagcataaaagcgttagaaagaaattgaaacaaagtcttttgaggttttccggtaacatgctatactcatttcggaaacctaactatttattggagaaaggaagttccagacagatgcagctaactgaactttccatcaaaagtcaaaataagtttgtgcagcactatatagatggagaaaacatgtcttcattttttgattatgatattcattcagaggacgtatggcaaaagcggcttcatgacctctcttcgcggccgtttgccagagaggaattagcggattatttatcctcctatcacgaaaaatttcactccgccgccatgcaggcctccatcgaaaaactgagagatccaaaaagcgcagcggttgtaggcggccagcaggccggtcttttaacggggcctctttacaccatacataaaattatctccattatcgtacttgccagacagcaggaagaggcgctgcagattcctgtcgctccgattttctgggtggcgggtgaagatcacgatctggaagaaattaattatgtgcatacgtcaacagagaataaaggtccggtgaagcggaaactgccgcagtcgtactggaaaaaaacatcggcggctaaaaccgagcttgatcaggaaaaatgcgcggcttggattgatgaagtgttcgctgcttttgaggaaacggatcacacaaacacactccttcaaaacgtgaagcgatgtttacgctcatcagagacattcacggacttttttgagctgttgatcgccgacttgtttcaagaagaaggccttattctgatgaattcgggagatccggggattaaaaagctggaaacgggtatgtttcagcagattttaaaacacaatcacgagcttgtcaaagccgtgtcagaccagcagcgtcttatgcgggaagccggttatcacccgattattgaatcggacaaagatcaggctaatctgttttacgaacacgagggagagcgtttcttaattgaaaaagaaaacggcgtttttgtcattaaggagcttgacctgaagtggacgaacgacgagcttcatacccatatggaagaaaaaccggaatgtttcagcaataacgttgtgacaaggccgcttatgcaggagtttctcatcccgactctggcgtttatcgcgggaccgggggagatcaattattggggtgagctgaagcaggctttctcattaatgggcttccgcatgacgccggtagtgccgagactgaacattacgattcttgagcgccatattgaaaagaagctttcagaacggaatattccgcttcaggaagcgatcgaacacggcaccggacacctgaaagacgcttattttgaagagcagattccggaagagttttcttctgtaatggaacaggcgaagtcgcagattgaagctgtccataaaagcgcaaggaacgaagcgctgaaggtcgattcaagccttgagccgctcttacagaagaatgccgccttcattcaggatcagctcttgtttttagaacggacggtaacgaaaagaattgaagaaaaagaaggttttgtgctgcgtgactatgaaagaatccaaaacagcatcagaccgctcggcgctccgcaggaacggatttggaatgtaatgtattatttgaaccgttatggtccaaaattcttcacaaccttcaaacatctgccattttcttttcaaaaccaacatcagattgtcaaactttgaaataaagttttaaagaaccctgaatagttcagggtttttttttatgtgtaaacagtgtaaaatgaggttgtggagagaagtggcggatagtggtgagtttaggggagaaagtggggtccttatcatgtttatgggtgaataccagcatacaattgatgcaaagggccgcatgatcgtacccgcaaaattcagagaaggcctcggtgagcagtttgtgctgacaagaggacttgaccaatgccttttcggctatccgatgaatgaatggaagctgattgaagaaaagctgaaggctctgccgctcaccaaaaaagacgcccgcgcatttacccgattctttttttccggtgcgaccgaatgcgaactggacaagcagggaagggttaatattgcgtcatctcttctgaattacgcaaaactggaaaaagaatgtgttgtcatcggggtttccaatcgaattgaattgtggagtaaggtaatatgggaacaatacacagaagagcaagaagattcattcgctgaaattgctgaaaacatgattggatttgatatataatggatcttcgtgcatcacaacaacaactgacaattcaattcattcctgataaaggtgggaccgacacaaatgtttcagcataagacagtacttcttcgtgaaaccgtcgacggtttaaatatcaaaccggacggaacctatgtggactgcacccttggcggcgccgggcacagtacatatttattgcagcaattatcggaaaaaggacgcctgatcgcctttgaccaagatgacacggcgcttgaaaacgcacagaaaacattgtccgaatacaaaggacagctcattctggtaaaaagcaactttcgttatttaaaagagtgtttacatgaacacggcattacgagtgtcgacggaattttatttgatttaggagtatcctctccgcagcttgatacaccggaacggggattcagttatcatcatgacgcaccgctggacatgaggatggaccagtcggccgcccttacggcgaaagaagtcgtaaatgaatggcggtatgaggaccttgtgaggattttctttaaatacggagaagaaaaattcagcaagcagatcgcccggaaaattgaagaggcaagagaaaaatcgcctattcaaacaaccggccaactggtcgatctaataaaggacgcgataccggctccggcgagaagaagcggaggtcatccggccaaacgtgtattccaagccattcgaattgccgtaaacgacgagcttcaggtatttgaagaggccctcttgcaagcgatagaggtgctgaagccgggcggaagggtgtctgtgatcacttttcactcgctggaagacagaatgtgcaagacgacattcaaggaaaaatcatcacttcccgaactgcctccgggtcttcccgtgataccggaagaatttgaaccggaattaaaactgattacgagaaagcccattacggcatcaaaagaggagcttgaagaaaataaccgcgcccggtcagcgaagctccgcattgcggagaaacgaaaataacgggcagcaaatgacaacattaaaggaggtcatcagcctatgagcaacttagcttaccagcaggaaaaacaacaacggccagtgataagtcccgaaaaaaaggtgattgtcaaaaagagggcttccattacactcggggaaaaggtgctgctcgtcctgtttgccattgccgttctctccacatcaatgtttatcgtatcaaaggcatacgcggcgtaccaatccaatattgaggtgcaaaaactggaggagaaagtatctgagaagaataagcagatcggtgatctcgaaaagacggctgctgacttaagccagccgcagcgcctgatggatatcgctaaaaagcacggtttgaatctgaaagataaaaaagtgaaaaacatacaggaatgataacccatgccgaaaaaaaataagtttatgaacagaggagcagcgatactcagtatttgtttcgctctctttttctttgtcattctcgggagaatggcgtacattcaattaaccggtaaagcaaacggagtagaacttgcaacaaaagcgaccgagcagcacgaaaaaaagcggacgatagaagcgagccgcggctctattcttgaccggaacggcaaagtgcttgcagaggacacggcgacatataagctcattgccgtgcttgataaaaaaatgacgagtgatccgaagcatcctcagcatgtcaaagacaaagagaaaacggcggaaaaactggcgaccgttatcaatcttgataaaagcgagattctggacatcttaaacaggaatggcgcgaagcaggtggaattcggttcagccggccgcgatatctcttatgcgaaaaaacaaaagatcgaaaaaatggatcttccgggtatttctttcttaagagatacgaagcgctactatccgaacggcatatttttgtcaaatgttctcggctatgccgatgtgaatgaaaaaacaaacgagatacaaggctctttaggacttgaaaaaatactgaataactatctgacggaacgtgacgggtccgtcacttacgaaagtgataaatccggctggaaacttccgaacagcaaagaaaaaatcaccgcacctaaaaacggtgacaatgtatatttaaccattgatcagaaaattcaaacctttctagaagacagcatgacgaaagtagcggaaaaatataaaccgaaaaaaattatggcggctgtcgtagaaccgaaaacaggcaaagtgcttgcgatggggcagcgtccgagttttgacccgaatatcagaaacgtcaccaattattacaacgacttagtgtcgtacgcgtatgaaccgggttcaacgatgaagatctttacgcttgccgcggcgattcaggaaaatgtgttttccgcaaacgagaaatataaatcaggaacatataaagtgggaggcaaacctgttaaagattggaacgatggcgccggatggggtatgacaagcttccatgacggcctcatgaggtcatcgaatgttgctttcgccaaactggccaacgaaaaactggggtttgaccggtttaatgagtacctgcacaaattcgggctctatcaaaaaacagggattgatctgcccggtgaagtatcaagtaaaattaactacaaatatgattttgacaaagcgtctacggcttacggccaagcatcggcgataacaccgatccagcagcttcaggccgtcacggcgattgccaataacggcaaaatgatgaaaccttacgtcattgatcatattgtcgaccccgatacgaaaaaagtcgtcaagcagacaaaaccggagcaagttggcacgccgatttcagccgatacggcgaaaaaagtccggaacctgctcggagaagtcgtgacgtcagacatcggaacgggaaaaccttataaaattgaaggttttgacgtcgcgggtaaaacgggaaccgcacaaatcgccgggacaggcggatatttaaggggaacgagcaactatgtgttttcattcatgggcatggcgccgaaaaatgatcctaagctcgtcatctatgtagccgtgcagcagccgcagttaaaagcgggtcaaagcagctctgatcctgtcgcggaaatctttaacccgacgatgaaaaacagcctccactacatgaatatcgaaccgacggaaaaaacagattccggtcaggaagaaacgaaaagccaaaagatgcctgacctgacagataagacagtcacgggcgctgagaaggaagcgaaaaatgaacatctcacaccgattgtcatcggcagcgatgttgccgtaaaagagcagtatccgacagccggagaagatgtgatcaccaatcagaaaatcttcttaaaaacagacggaaagatgacgatgccggatatgtccggatggtcgagacgggaagtgcttcaattcagcaaagtatcaggcattcacatcgatgtgagcggtgaaggttacgcttcaagccaaagtgtgaaaaaaggcaaagaactgaaagaaaataccgtgatcaaggtgaaatttaaaaatcctgattaacgggacagagaagtccgcggatgcccgcgggcttcttttttatgcgccgccgttctatgtgtccaagctgaggcataaattgaaacaagcctaaataaggagtggacggtcccttgcgcgtttcaaatgtaacggttcgaaaacgtttattactggttttgctttttggcgtaatcatttttttgatcattgacagcagattaggctatgtccaatttgtgatgggagaaaagctgacttcactggctaaggattcctggagccggaatttgccgtttgagcctgagcggggagaaatccttgaccgaaacggcgtgaagctggctacgaataaaagcgcgccgaccgtctttgtcgtaccgcgccagattcaaaatcccataaaaacgggcaagcttctcgcgtcagttttaaatatgtcggaagagaaggtctacaaacacattactaagaaaacctccatagaaaaaatctcacccgaggggcggaaaatttccaataaaaaagcgaaagaaatcaaagcgctcgacttaaaaggggtttatgtggctgaagacagcatccgccattatccgtacggaagctttttgtcccatgttctcggttttgcgggtattgataaccagggccttctcggattggaggcttattatgatgatgacttaaaaggtgtaaagggatcagtgaaattttatacggatgccaaggggaagaaaatgcctgatgaagcggatgattacacccctccgaaagacggacttgatatgaaattgacgattgacgccaaggttcagacgattatagaaagagagctcgataatgcagcggcgaaatataatccggacggaatgattgcggtcgcaatgaatccgaaaaacggggaagtgctcggtatgtcaagccgtcctgattttgatccggctgactatcaatccgtagatccgtccgtttacaaccggaacctgccggtatggagcacatatgaaccgggttcgacctttaagattattacgcttgcggcggctctccaagagcaaaaagtaaacttgcaaagagaccacttttatgacaaaggatttgccgaggttgacggcgcccgcctccgatgctggaaaaagggcggtcacggttcgcaatcttatcttgaagtcgttcaaaattcctgcaaccccgggtttgtacagctgggggaacggctcggaaaacaaaagctgtttcaatatattaaggacttcggctttggaaagaaaacaggcattgatctgcaaggggaaggaacggggattttattcccgcttgacagagtcggcccggtcgaacaggcgacaaccgctttcggacaaggggtttccgtcacgccgattcagcaggtggcagccgtttccgcagcaataaacggcggaacgctttatactccgtttatcgccaaagagtgggttgatcccgttacgaaaaaaacagttaagaaacaatcgccgattgcgaaaaggcaagttatttcccaggaaacgtcaaagcagatcagatatgctttagaaagcgtcgtcgctcagggaacggggcggaatgccttcgtggaaggatatcgcgtcggcggaaaaacaggtaccgcacaaaaggtcaaagacggcaaatatctcgaaaacaaccatatcgtctcctttatcggttttgcgccggctgatgacccgagcctcgtcgtgtatgtcgcggttgataatccgaaaggcacgattcaattcgggggaaccgtcgccgcgccgattgtcggaaatatgatgagagacagtctgccggagctcggcgtgaaaccgcgaaaaaatcaaatcgagaaaaaatatcaatggaacgacacaaaaacaatagaggttccgaatgttgtagggatgtctgtctctgatcttgagtcgctgcttgtcaatttgaatattgactcctcaggaaaaggaagcaaaattgtgaaacaatcacctgcagccggaacgaaagtaaaagaaggctcaaagatccgtgtttacttgagtgaagaatgagtctttttgaggcagccgattgttttcggctgccttttatcataaagagaaaaaaagaagataacttttaagattaactggatgtatccttttatttacgctaaaatatgaactgtatgtttaaaagccattctgacttttataaacggttatcatgataaaagaatgaatagaatttctgagaggtttgatacaatgaaacttacaaagctgcttacatatttaatggccgaacctgttcaaaatgactttcatgaccctgacataacttcaattgagatggactccagggaagtgagaaaagggagtctttttgtgtgtataaaagggtatacggtagacggacatgatttcgcccaaaaagccgcagaaaacggcgcagcggccatcgttgccgagaaagagcttgacgtcgatgttcctgtcattatcgtccgccggtcacagcgggcgctcagcgttctttctgacgcgttttacgggcagccgacaaagcagcttcagcttatcggcatcaccggcacaaacggcaaaacatcaacgacgcacatggttgatgagattttcaaaaaagcgggaagacagaccggtttaatcggaacgatgtacattaaaatcggggatgagacattcccggtcaaaaatacaacgcccgaaagcgtcacactgcaaaaaacgttcaagaaaatgaatgatgagcatgttgacacagctattatggaagtgtcttctcacgctctgtcactcggcagggttcacggctgcgattatgatatcgccgtattcacgaacctgacgcaggaccatttagactatcacaagacgatggaagactacagacaggctaaaagcctcctgttttcccagctgggcggctcctttaaccatgaaaagccgaagcgggccgttttaaacgcagatgacaaagccagtgcttattttgaaaaagtgacggcggcgcacatccttacatacggaatcgagaacgatgccgatgtcatggcgaaacaaatcgagatctctgcgcaaggcacaaattttgaactcgttacgccaaaaggaacaaagcagatcacggtttcactcgtcggccgcttcaacgtgtataacgtactggctgcagcggcgacagcgatcgcagcgggtctgccgtttgatacgatcacgagcgctcttgaagagctgcaaggtgtcagaggccggtttgaactggtgaatcataatcagccgtttcctgtggtcgtcgattacgcgcacacgcctgacagtctggaaaacgttctgaatacatgcaaagacatgacagagggcaagcttttcgtcgtcgtcggctgcggcggagaccgggataaaacgaaacgcccgaaaatggcggaaattgcggtgcggattgccgacgaaccgattttcacttcagataacccgagaagcgaggacccgctggccatattaagagatatggaaagaggggtagaaggcacctactatcacagtatcgcaaaccgcgagcaggctatcttttttgctattgccaacgcgaaaaagggagatgtggttctgattgccgggaaagggcatgaaacctatcagcagatcggcaatgaaacattcgactttgatgacgccgaagtagcgggaagagctattgttgagctgaataaaaagtaaaacaggaaagagtgttagaatgagtgaaatgaaaagaattacggggacacaatgtgaatatgataaatacgtatgtcgtttgaacgaaacgggaggagaaaagagcaatgcttgagcaagtgattttatttacaataataatgggatttttaatcagtgttctgatatctccgattcttatcccgtttttaagacgtttaaaattcggccaaagtatcagggaagaggggccgaaatcacatatgaaaaaatcagggacgccgacgatgggcggggtcatgattatcgtatccatcgctattacggcgattgtcatgacgcagaaattttcgcatctgagcgcggaaatgtttcttctgctgtttgttacgatcggatacggcctgctcggctttctggatgactatattaaagtagtaatgaaacggaatctcggattgacgtcgaagcagaaattgatcggccagatcattattgccattgtattttacggagtatatcattattgccatttttcaaccggcatcagggtgccgggcacacatctgtcaatcgatctcggctggggatactttatcctcgttctctttatgcttgtcggaggttcaaatgccgtcaacctgacagacggtctggacggtctcttgtccggtaccgcggctatcgcattcggcgctttcgccatccttgcgtggaaccagtcacaatatgacgttgcgattttctcggttgccgttgtcggcgccgttctcggttttcttgtattcaacgcccatcccgccaaagtatttatgggggataccggttcgcttgcgctcggaggagcgatcgtgaccgttgccattctgacgaagcttgaaattctgctcgtcattatcggcggagtttttgttattgagaccttatctgttatcttacaagtcatcagctttaaaacgacaggaaaacgaatctttaagatgagtccgcttcaccaccattacgaattggtcggatggtctgaatggagagttgtcgtcacattctggactgcgggactgctgcttgccgttttaggaatttacatcgaggtgtggttataagtggaaaacgaactttttttgcgaaaacaaaactttctggtcctcggactggcgaaaagcggatatgcggctgcgtcgattcttcatgaaaaaggcattaacgtcgtcgtgaatgatcaaaaagcctttgaagagaacgaacctgcccaaaggctttcagaaagaggaatcgaggtcatctgcggtgagcatccgacgtcactttttgatcagcatcacattaccattctgatcaaaaatcccggaatcccgtatgaaaatatcatggtggaggaagcgcaaagaagaggcatcccggtttggacggaaatcgagcttgcgtattatatcaccaatgcaaaattcatcggcattacaggttcaaacgggaaaacaacaacgacgaccctgatttatgaaatgctgaaagctgactcgataaaggcgctgatcgcaggaaatatcggcactgtcgccagtgaagtggcttatcatgctgacggtgatgaatggatcgtcacagagctttcttcgttccagcttatggggactcatgcgttcagacctgaaatcggcctgattttaaatgtgttcgacgctcatttggattaccatcacagccgtgaaaactatgaaaaagccaagcagaacgtgtatcttcatcagcttgagagtgatacggccatcgtgaatcaaagcgatgaaacagtcgtgcggcttgccgaaagcggaaaagccggcaccgttccgttttcagtgcaccaggaactgtcaagcggcgcatttattaaagacggaatgctgatgttcggcgatgaagcgattctgcctgttgatgacatcgtgctgccgggcgcgcacaatttagaaaatatattggccgctgtagccgcggcaaaaacggcgggcgcgtctaataaagcgattcagaaggtgctgacaagctttaccggtgtcaaacaccgtctgcagtatgtaacagcaatccggaatcgtaaattttataatgacagcaaagcgacgaatattttggccacaagcaaagcgctctccgcgttcaaagcaccggttattctgcttgcaggcggactggaccgcggcaacggttttgacgatctgaaaccgtatatggacaatgtcaaagcggtcctgacgttcggacagacagcgccgaagatagaaaaactgggcaatgagctgggaatacaacatgtcaaacgtgtcgataatgttgaacaagcagtatctgcggcgtttgcgctctcaaatgaaggagacgtcatcctcttgtcacccgcgtgtgcaagctgggatcagttcaaaacatttgaagaacgcggtgacatgtttatagatgccgtgcatatgcttaagtaagggcttgtctctgttcatcggcagccctaaatgacttatgcttggggtgtcgattgctttgactactaaaaaaacagcgcctgatttgttattagttatcattacgttattgcttttaacaataggattaattatggtctacagtgcaagtgcggtatgggcggattataaatttgacgactcgtttttcttcgcgaaacggcagctgctgtttgcggggatcggcgtcattgccatgtttttcattatgaatgtggattattggacatggcgcacatggtcgaagctgcttctgatcatttgtttttttctgcttgtgcttgtgctgattccgggagtcggaatggtgcggaacggttcaagaagctggatcggagtgggagcgttcagcattcagccttcggagtttatgaaactcgcgatgattgcgtttctggctaaatttctttctgaaaaacagaagaatattacgtcattcagacgcggattcgttcccgcgctcggaatcgtgttttctgcatttattattattatgtgccagccggacctgggaacggggacggtaatggtgggcacgtgcatcgtgatgatttttgtatccggtgcgcgaatcgctcattttgcgttcctcggactcatcggtttaagcggatttgcggcgcttgttctgtccgctccttatcggattaaacggattacctcttacttaaacccgtgggaggacccgcttggaagcggatttcagatcattcagtcgctctatgccgtaggtccggggggactgttcgggatggggctcggccaaagccggcaaaagtttttttacctgccggagccgcaaaccgatttcatttttgctattttatctgaggaactcggctttatcggcggttcgctcatattgctgctgttcagtattttattgtggcggggcgtcaggattgccctcggcgcgccggatttatacggaagctttgtcgccatcggtattatttctatgatagctattcaagtcatgattaatatcggcgttgtgacggggctgatcccggtaacaggaattacgctgccgtttttaagctacggaggctcatcactgacgctgatgctcgcagcggtcggcgtgcttttaaatgtcagccggtactcgaggtattgatctgtatcttgcctcatcactcatgatctattcgttatctataaaaaaacagacaacatcaataaccctgtcctaaaaaacagggttatcgctatgtgattaagggggacatacgaatgcgtattgcagtaagcggaggcggaaccggaggacatatttatccggccctggcctttattaaagaagttcagcgccggcatccggatgtggaatttttgtatatcggaacagagaacggtctggagaaaaaaattgttgaacgggaaaatatcccgttccgcgccattgaaattacaggtttcaaacgaaaactttcttttgaaaatgtaaaaaccgtcatgcgtttcttaaaaggcgtgaagaaaagcaaatcatatttaaaagagtttaaaccggatgccgttatcggtacaggcggctatgtatgcggtccggtcgtatacgcggcggcaaaaatgggaattccgacgatcattcatgagcaaaacagcctgcccggcatcacaaataagtttctctcgaaatatgttaataaggtggcaatttgctttgaagaagcaaaatcgcattttcctgctgaaaaagttgtgtttacgggaaacccgagagcctctgaagtcgtctcaattaagacaggccgctcattaactgagttcgggctgaaagacaatcaaaaaacggtgctcattttcggcggaagcagaggcgcggctcccattaaccgtgccgtgatagatatgcaggaagaattgaaaacgagaccttaccaagtgctttatattaccggggaagtgcattacgagaaggtaacggctgagctgaaaggcggaaaagccgctgataatatggtgacaaaaccgtttttgcaccaaatgccggagtacttacaatcaattgatgtcattgtggcaagagccggagcgacgacgattgcggagatcaccgctctcggcattccgagcgtgcttattccgagcccgtatgtgacagccaatcaccaggaagtcaatgcgaaggcgctcagccagcatgacgctgcaatcgtactgaaggaaaccgagctcagcggagaaaaactgatcgctgcgctggacaaaatcgtcatgaatgaagaaaccttaaaagacatgagtgagcggacaaaatcactcggtgttccggatgcggcagccagactgtacagtatcatggaagacataaaaaaatagagcaaatggaatgcggaggtttatgatggagaacgtaattcaggaattaagagaccgcgaagtcggcaaagtgctggaacaagaaccgctcgcgaaccatacaacgatgaaaatcggcggcccggcggacattttgatcatccccaacagtgtggaagcggtcaaagatattatggatattgtgaagaaacatgatctgccatggacggttatcggccggggttcaaatctgctcgtgcttgatgaaggcataagaggagttgtcatcaaactgggcgcgggtctggatcatttggagattgacggtgatcaggtgacggtcggaggcggctattcggtcgtccggcttgcgacttccatgagtaaaaaaggaatgtccggtctcgaatttgcagcgggcatccccggatcaatcggcggggccgtctatatgaatgccggggcgcacggatctgatatgagtgaaattcttgtgaaagcgcgtatcttatttgaagacggcacaatcgaatggctgacaaacgaagagatggatttcagctacagaacgtctgttttgcagaaaaaacgccccggcgtctgtctcgaggcagttcttcagcttgagcaaaaggaacgggaagccattacggcgcaaatgcagcagaacaaagattacagaaaaaatacgcagccgtattcaagcccatgcgccggaagcatattcagaaatccgctgccgaatcatgccggaaacctcgttgaaaaagcgggattaaaaggacatcagatcggcggagcgaaagtatccgaaatgcacgggaattttatcgtcaatgccggcggagcgactgccaaggacgttctcgacctgattgagtatgtgaaaaagacaatccgtgagcagtatgatgttgacatgcatacggaagttgaaatcatcggagggaatcgttaaaaggttctctgatttccatgagctcatgtgatatacttttaacaaatgtcaaacggcatcacagcatgccgtttgtttttcaatcagacgaatgtcaagctgtttcattcttagtgaggtggacaggcagtgaacccaaatcatgaaagagaaaaaatcgtaaatattgaagagcggattccgaaaatcaaagagcagcggaaacaaaaagcaaaccgccggctgatttcattcattgtgctcttttttatgatggtgctgatcatcgtgtacttgcagatgccgatcagcaaagtgtcttctgtcaccgtttccgggaacgaaaacgtgtctgtaaaagagatcaacgcgctttctgatatacataacggacaaaccgagttctggagtctgaacaagaaaaaaacagaagaaaagattgagcagaataaactggtgaaaaaggcggatctttcaaaagtatttcctaataaagtcagcattcacattgaagaatacaagacgatcgcgtatctgcagcggaatgatgtgtattatgaagtgctggagaacggcaccgtgctgccgaacgaagtcacgccggatgacgcgggcccgattttggttgactggacaaacgcgaaaaagcgggtcaaaatggcggagcagcttgataagctttccggttcgctaaagcagtcgatttctgaaatctattatacaccggtaaaaatggaccaggaccggatcaagctgtatatgaacgacgggtatgtagttaccgcttctattaaaacatttgccgaccggatgaagacctatccttctatcgtttcccagctggacggcgggaaaaaggggattatccacttagaagtcgctacgtattttgaagaatttaacaaaggtaaatccggcaagaaaaaagaaaatgattaatagttctaaagaactaattttaaggtgattcaaaagaatctattacaatcagcggggcagccgatataaccgatagcggaataattatgactatgtttgtttttgcccgggatatggctgccggacaaggggaaaattctcaatgcaatgggcgtgtcttcttcaatgaacattgcatttggaattttcctcctgtttcttcttttttcggatgtttctggcaatatctatagcttttctggaggttcatcttagtgtagactaatggaaagcgggtatatttgcatctggtttgcacattatggcaccgtgacaggaaatcttacggtaaggtgggccgtctctaaaaaaaataaaaaaaatgcgatataaaagaggatatacatagaatataacgaatagtttcattaaacataaattgtgagaaatcagataagaatttgttgatgctgttgtttttgttacacacttgtaaagccacattcattgtattgttgttccgcaaataatagaatagaatttgatcgaaatgtgaggaggtgccatagaatgaacaacaatgaactttacgtcagtcttgacatcggtacgtccaatacaaaagtgatcgtcggagaaatgacagatgattcccttaacattatcggagtgggaaatgtaccgtctgaagggttgaaaaaaggctcaatcgttgatatagatgaaaccgttcattctataagaaaagcgtttgaccaagctgaaagaatggtaggttttccgctgaaaaaagccattgtcggcgttaatggaaattatattcatattcaagatacgaacggcgttgtcgctgtttccagtgaaaacaaagaaattcacgttgaagacgtccgcagggtaatggaagcggcacaggttgtgtcggttccgcatgagcagctgatcgttgacgtcgttccgaaacagtttatcgttgacggaagagacgaaattaccgatccgaaaaaaatgctcggagtgcgcctggaagtagaaggcacgctgattaccggctccaaaacgatcttacataatttacttcgctgtgtggagagagcgggcgttgaaattactgatatctgcctgcagccgcttgcggccggttcggcggctttgtcaaaagacgaaaaaaacctcggagtcgccatgattgatatcggcggcggctcgacgacggtggcggtatttgaacaggggcacctgaaggagacagccgtcattccgctcggaggcgaaaacatcacgaaagatgtatcgatcggattgcgcacttccaccgaagaggctgaaagagtaaaaaaacaattcggacatgcattctacgatgaggcttcagaagatgaagtatttgaagtcaccgtcataggaacgaatcaaaagcaatcttttacacagcaggaaattgccaatattattgaagcaagagtggaagagattcttgagattgccgcagccgaaattgagcatatgggaattacagatctgcccggcggctttgtgctgaccggcggacaggccgcaatgcccggagtgctttcattggcacaggaagtgctgaggcacaatgtaagggtcgcaagcccgaattatatcggtgtaagagaccctcagtatatgacgggtgtcggcttgatacaatttgcctgccgaaatgccagaattcagggaagaaaaataggctttcatatgccggaagaagccgtgcaggaaatcgcggtctctcacgaagaagaacatcatcagcggccagaggcgcagcagcgtccaaaagcaaaacaaaaaacacaagccgaacacaacaaaccgagcaaaatgaaaaaactattaagcatgttttgggaatagattgatagtcattcggcagattaggaggatttagcatgttggatttcgaaacaaacatagacggcttagcatcaattaaagtaatcggagtaggaggcggcggtaataacgcggtcaaccgaatgattgaaaatgaagtgcagggtgtagagtacattgcggtaaacacggacgcgcaagctcttaacctgtcaaaagcggaagtgaaaatgcagatcggggaaaagctgacccgcggtctcggagcgggagcgaatcccgaagtcggcaaaaaagccgctgaagaaagtaaggaacaaatcgaagaagcgttaaaaggcgctgacatggtgttcgttacagccggaatgggaggcggtaccggaacgggagccgcaccggtgatcgcgcaaatcgcaaaggacttaggcgctttgactgtcggtgtcgtaacaagaccgtttacatttgaaggaagaaaacgccagctgcaggctgcaggcggtatcacggcaatgaaagaagccgttgacacactgatcgttattccgaatgaccgcattcttgaaattgtcgataaaaacacaccgatgcttgaagcattccgtgaagctgataacgtgcttcgccaaggggtgcaaggtatctctgacctcatcgcaacgcctggtttaatcaacttggactttgccgatgtcaaaaccatcatgtccaacaaaggttcagcattgatgggtatcgggatcgctacaggagaaagccgtgctgctgaagccgccaaaaaggcgatctccagtccgttactggaagcggcaatcgacggagcgcaaggtgttttgatgaacattacgggaggtacaaacctgagcctctacgaagtgcaggaagcagccgacatcgtcgcttctgcatctgaccctgatgtcaatatgattttcggttcagttatcaatgaaaatctaaaagatgaaatcgtcgtcaccgttattgcgaccggttttatcgaacaggaaaaagatgactcaaaaccgcagcgtccgactttaaaccaaggattgaagtctcaaagccaaaatgctgcgaaacgtgagccgaaacgagaagaaacacagcatcaaaacacggtgaaccgccatacatcacaaccggcggatgatgccctcgacattcctacatttttaagaaaccgcaacaaacgcggctgatgtaaaaaaggacaagaccacatggttttgtcctttttcttttttgtgcacagtcttccttcctatcccccatgatctatacagtgaaaaaagaagctttatacctatgacgaattgattgtttttaagtttcatacggctttctacagaatgtgacaatatctggatggaagattgtctacatttaacgtacagcatcgaaatgacaaacgattccaattatgaaggagggatacacattttatagggcgttaccaaataagggggatacgattgaagaaaaaaacgagaaacagatggacaggctccgttttaagcgcgattgtcgtcagttcactgttgtttccgggggcagtcggagcgaacagcacaccgggggcagtttcttttaccaaagatctttcttcctctaagagcattcagcataagatttccgattcagtcaagaagcgttttgaaaaaaatgataaagtcacgtttcttatcaaatttaaagagaaagccaatacgaaaaaagcggtcaaagaagcagaaaaaaatgccgagtctcattcgctttccgcagcaaaaaccgaatatcaaaagcggtcagccgttgtttcttctttaaaactggcagctcatgatgcgcagcagaatctgaaaacatatttggaaaaacaaaaaaagaaaggaaaggctgatcacatccattcctattatattgtcaacggaatggcagttactgcttcgaaagaggtaatggaaaaagccgcctcatttcctgaagtagaaaaagttcttccgaatgaaaaacgtcagcttactcaacggcaatcaaaagctccttttcaaatgaagaaaaaacaaaaagaggtcaaagcaaaggaaggcatcgaatggaatatcagccaaattgatgcgccgcaggcctgggcctcaggatacgacggaaccggcacggttgtcgcctccattgatacgggagttcagtgggatcatcccgcgcttaaggaaaaataccggggttacgatcctgaaaatccagcagcgccgaatcatgaaatgaactggtatgatgccgtgtcccataaagacgctccctacgacgatcttgaacacggcactcatgtaacagggaccatgacgggttcagaacctgacggctcaaatcaaatcggtgtggctccgggggcgaaatggatcgcagtaaaagcattttcagatgacggaggaaccgatgccgatattttggatgccggtgaatgggtgcttgcgcctaaagataaaaacggcacgccgcatcccgagatggcgccggatgttgtcaataattcctgggcgggcggttcgggaatggacgagtggtaccgcgatatggtgaatgcgtggagagcggcagggatttttccggaattctctgcgggaaatgaagacttatttacaccgggaggaccgggttcaatcgcaaatccggccaattatcctgaagcatttgcgacaggtgcgactgacatcgacaagaaactcgctgatttctcacttcaaggcccctcaccgtatcatgaaacaaaaccggacatttcggctccgggcgtgaatatccgttcttctattcctggaggaacatacgaaggcggctgggacggaacttcaatggccgggccgcatgtggcggcgacggcggctttgttaaggcaggcgaacgcctctattacggtcgatgaaatggaagacgttctgacgcgcaccgccgaaaagctgacagattccgtttttccggaatcaccgaataacggttacggccacggcctcgttaacgcttttgatgccgtttctgccgtaacggacggaatcggaagcgtagaaggcaaggtatcttctgcgggtgaagatcacaatccgcccagctttcatcatgaaccggtctcagaggcttacaaaggggcaaaccttccgttaacggttacagcagaagatgatgtaagcataactgaggtgatcctctcctatcagtttgatgaaggagagtggaaaacgacagccgccgttcaaaaaagcggtgatgaaaaaaagggaacataccaggcggagattccggacataacgggaagcaagataagttataaatggaccataaaagatttcggaggtcattctgtagaatctgatacgtaccgggctgacgtgaaaccgagcattacggcgggatacaaagaggattttgaatcacagccggcgggctggtccagttacgggacacatgatcaatgggaatggggtatcccgggttcagggcccggcgccgcattttccggagataaagtgtatgcgacgaatctgtccggcccttatgccgattcggccaacatgaatctcgtgatgcctccgattcaagttccggaaacagggcggctgtttttacaatttaaaagctggcacaagctcgaagaattttttgattacgggtatgtgttcgttctgccggaagggaaatcaaattgggagcaggcggccgtttacaatggtgattccgcaggatggaatgatgaagaggcggatttatctgcgtataaaggccaaaacataaagctcatgtttaatatgcagtctgacgaagtactcaatgaagacggatggtatatcgatgatatccggctttcaagcagccctctcggcaaggcggctaaaaaaagtaaacacaatagacaaacacctcccggccacctgaagaaaaaagccatcagtccgaaacaggccaaaccggcagtgaaatcacccggaaaaagagtgaaacgtgaaacaaacctcctgccgctcagagcgcaaatcagtgtcgccgagacggggaaatccgtatattccgaccctgcaagcggaagttacagcctgtcacataaggcgggaagctatacgctgaaagccgaggcttacggatttaagtccgcttcgaaacaagtttctattcaatcagacaaaaccgcacaggcagactttacactggagcaaatgccgtccggcacgctaaaaggaaccatcaccaatcagtccacaggcgaaccggtaaaaggggctgcgctttatgtggccgaggatgccgcaattgagccggcggtgacaaacgataaaggggaatattcgcttaaggcgtatgaaggctcctacacaatcaaagtagcggcaaaaggcttttacaatagcgaattttctgtcgacatcaaaggagatgctgaaaaaaacgtcaagcttaagccgtatgtcggttatgaaggggaaatcgcctatgataacgggacggaagaagccgcgctgtcatattttaaagccggcagcaaatctgccgttaagatgaccctcaaagacggaaaagaacacggtatgctgacgggaggcctttttaaattttggggcgccgactggcctgatccgggcggtaccgaatttcaagcagaagtatatgatgcatccggccctgatggagctccgggcagcaaaattgccggcccgttccaagctgaagcgcttcgaaacggcgagtggaccaaagtggatctcagctcaaaaggaatcgcggtcggaaaggatttttatcttgtgttccgtcagacgaaacccgatccttatacacctgccctgtcatctgatgacggcagcccgtactcgaacagaaactggcaatacctcgacggccgctggtcaaaagccgataaaacagacggaaactttatgatcagggctttggtcgactacgaagcttctgtgcctgagataacgtcgcctgaaaaccggtcatttacaaacaagaagtcaatcacggtgaaaggaacggcttcaccaaaaaccgctgtccgtcttaccaataacggtaaaaccgccgcagaaacgaaagcagatgcagacggcagtttccaggccggtgtcacactcactaaagatggcaatcggctgacagcggcatctgtgacagacagcgggtcaaccgacgagtcacgccctgtcacggtcatactggatgaggataagcctgatgtgacgattgacagtccggcaaacggtgataaaacaaataaagaagcagtgactgtaaaaggaaaagtgcacgacgcccatttaaaatgggtaaaggtgaacggaaaaaaagctgaagtaaataacggttcttatcaagcgagaacccttctggaaaacggcagcaatgagatcaaggtcacggcctcagatgaagctggtaacaaaacaacgaaaaagacggtaatcgatgtcaattacaatgctcccgtcatttccggattggttcccggagcggataaggaattaaaagccggagaatcagtgaaaatcgctttttcaagcggaaagaaattagacgcttccttcgtgatccgtctgcctctgacaaacgcccgggcagggagccaaaacgcaacagagcttccgctgagagaaatttctccgggacgatatgagggttactggacggcggcttcttccatcaaagcaagcggagcaaaaattgacgttatcgcaagagatgactacggaaatgaaacgagacagacggctaaaggaaaactttatatcaatgagtaaaaacagagcgctgccaaatcacggcagcgcttttttagttgaaggggacaatagaaaatcaaccttttcggccctcgacaaataaaacggttatcccttaaaaattgtactttaccctcaacattaattgacagactttcccacagagcttgctttatacttatgaaacaagagagagaaacagatatgtaagacaaaagaggaaaggggtcagatgtgaaaatctatctggatgtcatttggctgttgaacttttgttttgattctcttttgcttttattgaccgcctttattttaaaacgccaggtgaaaaaaagaagagtggccgccggcggtttcatcgggtcagccattgtgcttctgatgtttacgcctatttctccctttgtggagcatccggcgggaaaaatggcgttttcggtagtcatcgtgcttacggcttttggctttaaacggttccgatacttttttcaaaatttgttcgccttttatttcgcgacttttctcgtcggcgggggaatgatcggcgtacattccctgctgcagacagaatcaattgtgcagcaaggcgtaatggttacaagccagaccggattcggcgacccgatcagctggatgtttgtagttatcggatttccggccatatggtttttttcgaaaaagagaattgaagacatcgagacgaagtccattcagtacgatgaacttgtcatggtgcaggcggaattcagcggacagacaatccgcgcgaaaggattggtggattccgggaatcagctgtatgatccgctgacgaaaacgccggtcatgatccttcacattaacaaattcgctccgatcctcagcgaaaaggaaacggacttcatcaaatccgccagtccgcttgaagtgatagagcagcttgatgattcgttccgccatgcggataagctgaggctgattccatacaggggcgtcggccaggacaatcaatttttactctgtttaaagccggattacgtcacgattttaacaaaagacgagatgatcgcatgtgaaaaatgcctgatcggcatcagcacgaagccattatccgctgacggtgaatttgacggaatcgttcatccgaagatgctgacagggaaggctgtaaaacatgtttcctgacgaaaagtctgttattcatcatactcaaaacgcgtggtatttagaagggggaggaagatgaaaaaacttaagctgcgtctgacatatttgtggtataaatggctgatgaaactcggactgaaaagcgatgaagtgtattacataggaggaagcgaggcgctgccgccgcctttgtctaaagaagaggagcaggtgctcttattaaagctgccgagcggggatcaggcggcgcgggccatcctgattgagagaaacttacgtcttgtcgtttacattgcccgcaaattcgaaaacaccggcatcaatatcgaggacttaatcagcatcggcaccatcggtttgatcaaagcggtaaacacgtttaatccggaaaagaaaatcaaactcgccacctacgcatcgcgatgtattgaaaacgaaattttaatgtacttgcgccgaaacaataaaatccgttcagaggtgtcctttgatgaaccgctgaacattgattgggacggaaacgaactgctgctttcggatgtgctcggcacagatgatgatattattacgaaagacattgaagccaatgtggataaaaaacttttgaaaaaagcgcttgagcaattaaacgaaagagaaaagcagattatggaactgcgtttcgggcttgtcggagaagaagaaaaaacccaaaaagatgtagccgacatgatggggatttcacaatcttatatctcccggctcgaaaagcggattatcaaaagactgagaaaagagtttaacaaaatggtgtaaaattttttccatctgacagcccttactgctgcaaggattgccgccgccggatgtttatttctgtaaaatagcggtgcatatttttcccacccgaggagatacttaacgttgtacagcagctcctagtgggagggaaaaacgtgtcaagaaataaagtcgaaatttgcggggtggatacctccaaattaccggtgctcaagaatgaagagatgagaaagctgtttaggcaattgcaggatgagggcgatgattcagcgagggaaaagcttgtaaacggcaatctgcgccttgtcttaagcgtcattcagaggtttaacaacagaggagagtatgttgatgacttatttcaggtcggctgcatcggactaatgaaatccattgataattttgacctaagccataatgttaagttttcaacatacgctgtaccgatgatcatcggagaaatccgcagatatttgcgggataacaatccgatccgcgtctcgaggtcgcttcgcgatatcgcatataaagcgcttcaagtaagagagcggttaatcagtgagacaagcagggagccgacagcagaggaaatcgccaaagttcttgaagtgccccatgaagaaattgtgtttgcccttgacgccatccaggatccggtttcactgtttgagccgatttataatgacggcggcgatccgatctacgtgatggaccagatcagcgatgagcgcaacaaggatacacaatggattgaggagctggctctgaaagaaggcatgagaagactgaacgaacgggaaaaaatgattttgcgaaagcgctttttccaagggaaaacccaaatggaggtcgctgaagaaatcgggatatcccaagctcaggtctcaaggcttgaaaaggcagccattaaacaaatgaataagaatatccatcaataacggaaaaagcctttaaaccttgtttaaaggcttttttcatgcgatggtttacgtttgcaaaaaagtgatgtattctaatgtgtaaaagtttttagaaaatttaaataaagtaaacgggggaaacggcaatgattttacagctggacagtgtgtcattaaaaagaaacgggaaatggattttgaaagatattaactggcgcgtcgagaaaaacgaaaattgggtgctgtacggattaaacggagccggaaaaacggctttgctgaatatgttatgctcttattacttccccacttcaggagagatgcaggtgctcggccatcagttcggcaaaacagagctcggtgacaggctcagaaggaaaatcggccttgtttcggcaggtcttcagcacaaattatatgccgcggactccgcttttgaaatcgccctcagcggcgcgtacgcctcaatcgggctgtacgaaactccgagtgagcaggtaagggaaaaagcgatcggtcttctgaaggatttgggcgccatcagttacgccgacaggcggtatgaaacattatcacaaggggaaagacaaagagcgctgattgcgcgggcgcttatggctgatcccaaactgctgattttggacgagcccgtgacgggtcttgattttatggcaagggagcagctgctggacacgattacgtcgatcgccgaaaaagaaaatgcgccgtccatcctttatgtcacccatcacgctgaagaaattctgccggtatttgataaggcgctgcttttaaaacaaggcgaggtgttcgcctccgggaaaatcagggatatgctttctgacgagcggcttacagcgtttttcgatacgcctgtcaatgtcttatggaacaatggccgcccgtttttaacacgtgcaaaagaggcatcaaccgtaaaataacatcaattcaccctgggggtgctgccatgcggctgagagagacgttgtctcaacccttaacggacctgatccggatcatgccggcggagggaagcggtgaaaaaagcggaggaagatccgttttttacccgtttcattttaatgaaacgggttttttgatacagctaaaggggagatttccaatgcatcagattgatatgctgttacaacaggcggagaaacggaggcacgacttcatacatattgctgaaaggttgatcgcctttcccactccggccccgccagcaagaaatacggcagaagcccaaaagtgggtggccggctttttaaaagaaacgggctgctcggtcgatatgtgggatgtgtatccggaagatccgaatgtagtcggtgttttaaaagggacagattcaagcaggcatcaaagcctgattttaaacggacacattgatgtggcagaagccgggggcgaagattggaactctgacccgtttcagccgctcgtaaaagacggcatgctgatcggaaggggcgccgctgatatgaaaggggggttggcgtgtgttcttttctctctgaagctgatccatgatgccgcaattaagcttccgggcgacctcattgtacagtctgtaatcggagaagaagtcggcgaggcggggacgctggaatgctgcaaacgcggctatcacgcggattttgcggttgtcgcggatacgagcagcctgcatattcaagggcagggcggtgtcatcaccggctggatagaattgaaaagcaaacaaacatttcatgacggcatgaggcgcaatatgattcatgcgggcggaggcacattcggagcgagcgccatcgaaaaaatggcgaaaatcatcactgccttgggagagctggagcgccactgggcggtaacgaaaagctatcccggcattgcgcccggcaccaatacgatcaaccccgccgtcattgaaggcggaagacacgcagcgtttgtcgccgatgaatgccggttatggatcaccgtccacttttatccgaacgaaacgcacgaacaagcagccgcagaaatcgaagactatattaatcgtgtcgctgacagtgatctgtggctcaaagaaaacaggccggtgttcaaatggggcggatcttcgatgattgaagacagaggagaggtgttcccggcgctggaaatcgatccggatcatccggcagtttctgtcttggctgcatcacactctgccgtcataaaacaggagcccgtcattgatgtttcccaaaccgtaacagacggaggatggctttatcaggccgggattccgagcgtcatatacggccccggcgatttaaaaaacgcccactccgtaaacgaggaagtgtccgttgatgagcttatggactatacgaaaatcatgctgagatttattctcggctggtgcagccgcaaaaaagattgcccgatgtgacaaggttcagcccggccgttcatataataggaaaaagaacgggcaaagggcgtgatacggatgatcagcatatctgaatttcaaataaaagatgtggtaaacgtgtcgaacggaaaaaaactcggaagcatcggggatattgatattaacgtgacaacgggaaaaattcaggcgattattttaggcggcagcggaaaagttctcggttttttcggaaaagaagaggaaatgatcattccttggcgaaatatagttaaaattggggaagatgtcatcttagtgcgtgtaaatgaaccaaaggggggagcgtaatcctccctttacttgtaaaaagccggaaatctcaatgtttccggcacatttatttatctcatttttcaatcagccgctaaacgtatgcttaaaattgtgttaaaatgagtgggaaattacgcttttttaatgtttgtcgaaaggttggatctccatgaatacatatcacccgtttagtcttaccaccccctcggcactcatgatagaagactggaactgtgtgaatcagcttaacacaaaggtcatcgccggattcacaacgaaaaacggcggtgtcagcaatcctccgtatgagtcattaaataccgggttgcacgtccgggacgaagctcatgatgttgtgacaaaccgtgaagtcatagcgtccttatgcggtactgatctggattcctgggtgttcgccgaccagacacatgaaaaccgcgtccggcgcgtgacagccggggataaaggaaaaggagcgagagactattcttccgcattccgcgggacggacgggctctacacgaaagatgcgaatctttttttggccctttgttttgcggactgtgtgcccttgtatttttatgacccggtgaaatccattatcggcgctgcccatgccggatggaaggggacggtcaaacaaatcggacgcatcatgacggaacgctgggtaaacgaagaaggctcccgtttaacagatattcaggctgtcatcggttcgtccatcagcgcgggaagctatacagtcgacgaccgcgtcatcaatgaagtgcgggcgctgccctttacggctgaatccgccatatgcgaaacggaaaaaggccagtatcagcttgatttaaaagaggtcaaccgtcttcttctgatacattgcggcattccggaagaaaacatttcagtcagcggattatgcaccgaacgagagcatgaactattcttttcacaccgccgcgacaaagggaaaacgggacgcatgatgtcctttatcggaatgaaggaggcattagatcttgcgtgttgctgatcaattacgacatataaacgaaagaataaacgaagcatgtaacagatcgggccgaagccccgaagatgttaccgtcatcgcggttacaaaatacgtatcagctgaaagggctcaagaggccgttgatgccggtattacaagtctgggagaaaaccgggatgccgagcttatccataagcaggaagtcatcaaaggaagcccgaagtggcactttatcggcagtcttcagtccagaaaggtgaaggccgtcgttgaccgtgtatcttatattcattccttagacagactgtcattggcaaaagagattgaaaaacgggcgcagcatacggttcgctgttttgtgcaggtgaatacttcgcttgagccgtctaagcacggtttgaaaacagaggaggtcatcccctttatcagagagctttctgagtttagaaacatttctgtagagggcctgatgacgatggctcccctgacagacgatacagaaacgatcagagcctgcttccggcaattgcgtgatctgagggatcaggtgcaaaaactgaatcagacaaacgcgccgtgccgggaactgtcaatgggcatgtcaaatgattatgaaatcgctgttgaagagggcgcaacttttatcagaatcggctcttcattagtcggaaatgaaccggggggtgtaaacaaatgagcatgaaaaataaactgaaaaactttttctcaatggatgaggaggagtacgagtacgaatacattgaaacggagcaggatcatcaggaagagcatgaacagcagaaagataaacagcctgcttacgctcagaagccgcagggcaagcagaacgtagtaagcttgcaaagtgttcagaaatcctctaaagtggtcttgagtgaaccgcgtgtatatgcggaagcgcaggaaatcgccgatcatttaaagaacaggcgggcggttgtcgtcaatctgcagcgcatccagcatgatcaggcgaaaagaatcgtcgactttttaagcggtaccgtctacgccatcggcggcgacattcagagaatcggttcagatatttttctgtgcacgcctgataatgtcgacgtttccggcacgatttcggagcttataaatgaagacgaacatcagaggtggtaaagcaggatgattctttatcaaattttttccgttctgagttatttaatttacatctactcgtttgccctgatcatctatatctttatgtcatgggtgccgagtacgagagaaacggcggtcggacggtttctcgcagcgatttgcgaaccgtatttagagccgttcagaaggatcattccgcccattgccatgctggatatatccccgattgtagcgattatcgtgcttcggtttgccacgacgggactttggggcctataccgcatgatcgcaatgtatacttgaatgcgacagtttgatacgggcttggcaccagccaagcctctttacatagaaaggaaagaacatgagcgatatttaccagcacttcagacaagacgagcggccttttattgatcaggtgcttgaatggaaacagattgtcctggaccagtatcggatgaagctgactgatttcttagatcccagggaacaggtgattgtaaaagccgttatcggcgacgcctgcggtcttgcgtttttcggaggatatgacagagctgagcgcaaacgcgcgattttataccctgaatatatggaacctgaacaggatgattttgagctccgggcttttgacgttcaatacgctgaaaaattcgtcagcattgaccaccgctctcttctcggatcattaatggggatcggcttaaagcggcagaaatacggcgatctgattttctcagaggaagccgtgcagctcatcgtctccggtgaaatcgccgattttgtcagcactcagctgaccaaggcgggcaaagcgccggtaaagcttgagaaaatcgagctttccgctcttcacattcccgcttcagatgtcgaaataagggatgacacggtttcttcattgcgtctcgacgccgtctgcgcttcaatgagcaggcaatcccggcagaaagcgcaggcgcttgtgaaaaacgggctcgttaaggtgaattggaaagctattgaagatccgtcttatcaggttgctgaaggggacatgctctcgattcgcggcttcggacgatgcagtttggcaaaagttgacggaaaaacgaaaaaagacaaatggaaagttacatttgaacggcaaaaatgagtcgttttttcagtttttttctccatctgtgccgtatttgttttataatgtgaactagataaccgtactgaaatgtaaaaatggaggtggcaatatgccattaacgccgaatgatatccataacaaaacgtttacaaaaggttttcgcggatatgatgaagatgaagtaaatgaatttttaatgcaggtcagaaaagattacgaaatcgcactccgtaaaaaaacggagcttgaggcgaaagtgaacgagctggacgaaaaaatcggccactttgccaatatcgaagaaacgctgaataaatcaattctcgtagcccaggaagccgcagaagacgtaaagcgcaactcgcagaaagaagcgaagctgatcgtccgtgaagcagaaaaaaatgccgatcgcatcatcaatgagtcgctttccaaatcaagaaaaatcgcaatggaaatcgaagagctgaaaaaacagtctaaagtcttcagaacacgtttccaaatgctgattgaagcgcagctcgacctgctgaagaacgatgattgggatcatctgctggaatacgaagtcgacgcggtatttgaggaaaaagaataattttctgattttcttgacattcttcggcccgttcgaatataatacgttcataaattcagatgaaaagacgattgaaagggaccggcatgactcaaaacaggctataaagcgaaccggggaaggtgaaagcccgggatggccggaatcatgcagatcagccctttagtttcctttctgaaccgagagtaggaaaggacgttccatcacgttacgatgttcgagaggaaaagacggatgatccgttttttctaaaagggtggtaccgcgagataagctttctcgtcccttatgggatgagagggctttttttattttctgaaaaatgttgtggaggaatgaaaatggattacaaagatacgctgttaatgccgaaaacagattttccgatgcggggaaatctgccgaatcgtgagccggacatgcaaaaagactgggaggagcaggacatttaccgtcttgttcaagaacggacgaaagaccgcccgaaattcgtgctgcatgacggacctccttatgcaaacggagacatccacatgggccatgccctgaacaaaatcctgaaagacttcatcgtccgctataaatcaatgagcggctacaacgcaccgtacgtgccgggctgggatacgcacggactgccgattgaaacggcgctgacgaaaaacaaaaaagtaaaccggaaagaaatgtccgtcgctgatttccgcaagctttgcgaagattatgcatggcagcagatcgaaagacagcgcgaacaattcaagcgtctcggcgtcagaggcgattgggaaaacccgtatgttacgcttcagcctgaatttgaagcgcagcagatccgcgttttcggcgagatggcgaaaagaggctatatttataaaggtctgaagccggtcaactggtcgccttcaagtgaatctgccttagcagaagcggaaattgaatatcaggacaaacgttccgcgtctatttatgttgcgtttaaagtgaaagacggtaaaggcgttctggaaaacggagaaagcttcatcatctggacgacgacgccgtggacgatgcctgccaacctcggaatttccgttcatcctgatcttgaatacaatgtcatcaaggttggagacaagcgttatgtagtggcggctgaactgatcgaaaacgtagcggaggcatgcggctttgaaaatcctgaagttgtcgcatcatataaaggcagagaattagaatacatcactgcagaacatccgctgtacggcagagattcactcgtcatgctcggtgaccacgtcacaaccgatgccggaacaggctgtgttcatactgccccgggccacggggaagatgactttatcgtcggccaaaagtacggcttagaagtactgtgccctgttgatgaaaaaggaaacatgaccgacgaagcgccgggctttgaaggaatgttttacgataaagccaataaaccgatcacggagaagcttgaagaaaacggcgcgcttttgaaactcgagtttattacacactcctatccgcatgactggagaacgaaaaaaccgacgatcttcagagcgactgcgcaatggtttgcgtcaattaaagatttcagatccgatctgcttgatgccatcaaacaaacgaagtgggtgccggagtggggcgaacagcgcctttacaacatggtgcgcgaccgcggtgactggtgtatctcaagacagcgcgtctggggtgttccgatcccggtattttatgcagaaaacggtgagccgatcatcactgacgaaacgattgaacacgtgtctgagctgttcaaacagcacggctcaaacgtatggtttgaaagagaggcaaaagacctcctgccggaaggatttacacatccgggaagcccgaacggaatcttcacgaaagagcaagacattatggatgtatggtttgattcaggttcttcccatcaggccgttcttgaagaacgagatgatcttgtccgtccggctgatttataccttgaaggctctgaccaataccgcggctggtttaactcatctctttccaccgctgttgcagtcaccggcaaagcgccgtataaaggcgtattaagccacggatttacacttgatgcaaacggccgtaaaatgagtaaatcactcggcaatacgattgacccgacaaaaatcgcaaaacagcttggagctgaaattctgcgtttatgggtatcttccgtaaactatcaggccgatcacccggtttctgaagatattctgaagcaggtcgcggaagtataccggaaagtccgcaacacgttccgcttccttcacggcaacctgttcgattttgatccaagcatcaatgccgtggatgtaaaagatctccgcgaagtggatcaatatatgctgatcaagctgaataagctgatcgataaggtgaaaaaagcgtacgatgaatacgaatttgcggttgtttatcacagcattcacaatttctgtacgatcgagctcagctccttctatcttgattttgcaaaagatgttgtgtacatcgagcatgcggatcatccggaccgccgcagcatgcagaccgtcttttatgaaacgctgctggcgttagtgaaactgacggcgccgattctcccgcatacggcggatgaaatgtggtctcacttatcatttgttgaagaagcgagcgtgcagctgacagatatgccggaaaccattgctgttccggacagtcaggcgacagaagaaaaattcgaccgcttcatggagcttcgaaacgacgtgctgaaagctttggaaacagcccgtaacgaaaaaattatcggaagatcattggaagcgagccttactttgtatccgaacaaagaaaaccgcgacctcttgtcatccattaaagaaaacatcgcgcagctgtttatcgtctcagaactgacagtaaaagacgaaagtgaagcgccggaaaacgcgcaaagctttacaacaggaaaaatgaccgtagaaaaagcggaaggccagatgtgtgagcgttcccgcgtaatttctaaagatgtcggagccaatccgaaatatccgacattatcactgcgcaatgcggaaatcgttgaaaaatattatcaaaaataataaatgagaaagcgcccggtgtcagccgggcgcttttttacatgccagcaatgtcatcgattagaacggcaggaaaattcttatgggcttcaaatagcgctctgagggcaacaataaagctataacatcaagagcaggagttgtgatgaatgaatgatcaactgaccgcaatccacacggagcttctcatgatgaaagaagaacttcaatcaagattattcgaatattcttgctttcaaatgtcagcatctgttgaaccttcaatgaacgaccaagaagcaactctgatctatcatataaaagaagaacttcaggatgttcttcttgccctgtctaagtttgaaaacaatacgtacggttattgtgaaaaaacaggcgcccccattccgattgaaaaacttgcggtgctgccgacggccagaaccgctgatgatttttattatcccgctcaatttgaaaagaaaacccttccatactgggtaaccggagattatgcatatgatcaggcgctgtatgagtgacagcgtctgtttgcatacgcttatgatctgcctttactccggcatcttttactgataaaattcataaaggataaaagtaactgtatactggaggaacgtgtgtgctttattatcttatcgctctttttattattattgccgaccaattgaccaaatggcttgtcgtcagccatatggaattgggacaaagcatacctgtcatcgaccaggtgctttatatcacatctcatcgcaacacgggagcagcgtgggggattttagccggccaaatgtggtttttctacgtcattaccatcgccgtgattatcggaatcgtttattacatacagcgttatgcaaaagggcagatgttactcggaatttctctcggcttaatgctgggaggtgcggccggaaactttattgaccgggcggcgcgccaggaagtggtggattttattcatgtcatcatcgtggattatcactatccgatttttaatatcgcggactcctcactgtgcgtcggtgtaatacttttatttattcatatgctgtttgacagcgggaaaaagaaggagcaataacatgaatcaatttgagataaccgttcagcctgaacaaaagagcgaacggattgataaatttttggcttcaacgggagaaaactggtcacgcactcaagtgcagcaatgggtaaaagagggactggtatccgttaacggcaaatccgtaaaagcgaattataaaatgcagcccggcgatcaggtaaacgtcaccattcctgaaccggaagaattggacgtgcttgcagagccgatggatttggacatttactatgaagaccaggatgtcttggttgtgaacaaaccgcggggcatggtcgtacacccggcgcccggccatgtgacagggacgctcgtaaacggactgatggctcactgcaacgatctttcaggcattaacggcgtcatgcgcccgggaatcgtccaccggattgataaagatacctccggcctgttaatggtcgccaaaaacgatatggcgcatgaatcactcgttaatcagctcgtcaataaaaccgtgacgagaaagtacacagcggttgtccacgggttgatttcacatgatgacggaacgattgacgctccgatcgggagagataaaaaagaccgacaaagcatgaccgtaacaagagaaagcagcaaaaacgccgtcacgcatttccacgtgcttgagcgttttcaagacttcacgctcgtagagtgccgtcttgaaaccggaagaacgcatcagatccgtgttcatatgaaatatatcggatttcctttggcaggcgacccgaagtacggaccgagaaaaaccattgatttcaacggtcaggcgcttcatgccggaatattaggttttgaccatccgcggacgggcgaatacatggagtttgaagcgccccttcctgaagatatgaaaaaactcattgaacatttgagaaatagccattgacagcgagtttcttttctgaaataataaaaacaagctgaatagattctttaacacagtccagagaggctgagaaggataacggataggacagaagagatacacgtgtgtcttggtcctggaaaggaacccctctatgctctggcaggaggggttttttcttcttatatacgaatggagaggtgtcacgattgaatcaaaaagctgttattctcgacgaacaggccatcagaagggcgctgacaaggatagcccatgaaatgatcgaacggaataaaggaatgaatgactgcattcttgtagggattaaaacaagaggtatttatttagcgaagcggctggccgagcggatcgaacagattgaaggaaatccggtcaccgtcggggaaatcgatatcaccctttaccgtgacgatctcacaaaaaaaacgagcaatgaagagccgcttgtaaaaggcgcggacattccggccgatatcacagaccaaaaggtcattgtggttgatgatgtgctttataccggccggacggtgagagctgcgatggatgctctcgttgatgtcgggcggccgtcatcgatacagcttgccgtgcttgtcgacagaggacaccgggagctgccgatcagagcggactatatcgggaaaaacattccgacctcaaaagctgaaaaagtgatggttcagctgagcgaagttgatcagactgatatggtcgccatttacgaaaatgaataaccaccctttttaaatgcattccagagagtttgcaaagaggattttaaaacacaaagccgggcggatcgacacggccgggctttgtatgcctctttgcgcaaaaagcaaagaggtttttttataccatttgaaagtcaaccgggaggaaaacgccatgagtaagaaaaaagtaaacctgggagtcagggacgtccccaatccattgtcctggctgtcattcagcctgcagcatttattcgccatgttcggttcaaccatactcgtgccgaaactggtcggaatgagcccggcagtggcgcttgtcacgagcggaatcgggacactcgcctatctcttggtgacaaaaggccagattcccgcttatctcggctcatcattcgcctttatatcaccgattatcttggtgaaggcgacgggagggccgggggctgccatggtcggcgctttcctggcgggaattgtgtacggcctgatcgcgcttctcatcaggcagcttggaacggggtggctgatgaagctgctgcccccggtggtcgtcgggccggtcatcatcgtcatcggcctcggactggcaagcacagccgtcaatatggcaatgtatgctgatccgaatgcgaaggaactcgtttacagcctgaaacatttcagtgtagccggcgtcactttggccatcaccattatctgcgccatctttttacgaggatttttaagcttgattccggtattgatcggcattataggcggatatctgtttgcgctgacacagggcatcgtcaattttcagccggtcattgatgcaaaatggttcgccgttcctgaatttatcatccctttcaaagactacacgccgtcagtgacattgggcattgccgctgcgatggtgccggtcgctttcgtgacgatgtcagaacatatcggccaccaaatggtgctgagtaaagtcgtcggacaggattttattaaaaagccgggactgcaccgctccataatgggggacagcgtagcgacgattatcgcttcgttaatcggcggcccgccgacgacaacatacggcgaaaacatcggtgtcctggcaattacgagagttttcagcgtctttgtcatcggcggcgcaggagtgattgcgctgtgcttcggatttatcggcaaagtttcagcgctgatcagctctgttccgtccgcggttatgggaggcgtttccttcctgctcttcggaatcattgcctccagcggcttgagaatgctgattgacaacaacattgattatgaaaacaagcgaaatttaattatcacatccgtcatcctcgtgatcggcgtcggaggggcttttattcaagtatcaaaaggcgggttccaaatatccggcatggcgcttgcggcaatcgtcggagtcatcctgaaccttatcctgccgcatgcaaatgaagaagacgcgattgcatcggaaaaactaaatcatatgtaaaccttttaaagaaagtccagagaggcttggaagggttataacgggaagacgctgtacggctcttctctctttaaccgcaccccgagtctatagaccggggtgttttttacggccttcaagcggaaacggaggagaaaaaacatgaatcatttaacggcgatgtctgaactgagcgcggctgaaattacagaactgctgcgagaggcaaaagcgataaaagagggtgcagtccgtcccgatctcgcgggaaaattcgttgcgaatctgttttttgaaccgagcacgagaacgcggttcagctttgaagtggcggaaaagaaactcgggatgaacgtgctcagcttagacggcacgagcacaagcgttcaaaaaggcgagtccttatacgacacggtcaaaacactggaatcaatcggagcggacgcctgcgtcatcaggcacagcacggatgaatattacaaagatctgaccggcagagtcaatattccggtcttaaacgcaggagacggctgcggacagcacccgacccagtcattgcttgatttaatgacgattcaagaggaatttgagacctttcagggcctgacggtttccattcatggcgatatcaaacacagcagagtggcaaggtcaaatgccgaggtgctgacaaggctcggcgcacgtgtgctgttttccgggccgccgcagtggcaggatgagaaaaacgccttcggcacctgtgttcagacggatgaggccatacaagcttcagatgtcgtcatgctgctccgcatccaaaatgaaaggcatcagacagaagccgaccaaaaaggctacctggaagcatacgggctgaccgaaaagcgggcgcagagcatgaagcggcatgctatcatcatgcatcccgcaccggtgaacagaggagtcgaaattgacacaacattagtggaatgcggaaaatcaagaatctttaaacaaatggaaaatggtgtgtatatcagaatggcagtcttaaaaagagcactgcaaaccaatgtgaaaaggggagaagcggcttatgtcttatctcattaaaaacggctggatattaaatgaacagggagaaaaagcggtacatgatatccgggtaacgggtgaattcatttcggaaaccgggcttctgacagcgaaagacggagaaacggtgatcgacgctgagggactgttcgtttcacctgggctcgtagaccttcatgtccacttcagagaaccgggcggcgagaaaaaagaaaccattgagacgggctctaaagccgcggcgcggggcggttttaccacagtcgccgccatgccgaatacaaggccggtgccggatacgaaagagcagatggaatggctgcaaaacaggatcaaagaaacctcatctgtcagggtccttccttacgcatcgattacgatcagacaaaccggcgaagagatgacagattttgaggcgcttcatgaagcgggcgcattcgccttcaccgatgacggcgtcggagttcagacggccggaatgatgtatgaagccatgaaacgggcggcttcaataaataaagcgattgtcgctcattgtgaggataactcacttatttacggagggagcgtgcatgaaggttctttttcaaaagcgaacggcctgaagggtataccttccatttgtgaagcggtacatatcgcccgtgacgtgctgctggcggaagcggcgggctgccattaccacgtgtgtcatatcagcacgaaagaatccgtcagagccgtaagagacgcaaaaaaagcgggcatccgcgtgacggcggaagtatcgccgcaccacctgctgctttgtgacgaagatatcccgggacttgataccaattttaagatgaatccgccgcttcgcagcaaagaggacagagaggcgctgattgaagggcttttagacggcacgattgatttcatcgccactgaccatgcgccgcatacagaagaagagaaaaacacggacatgaagcttgcgcctttcggtattgtcgggttagaaactgcctttccccttctgtacacacattttgtgaaaaacgggacgtggacgctgaagcagctggttgatttcatgacggtaaaaccttgcgaggcattcggtcttccgtacggaacgcttgcaccgggggcgccggctgacatcaccctaattgatctggacaaagaagcggccattgacaaagatacatttttatctaaaggaaaaaatacgccattcaacaagatgaagtgcttcggctggcctgttgcaacgatggctgccggtaagcttgcatatgaagaagggagactcgtcaaatgaaaagaagactagtgctggaaaatggagcggtatttgagggtgaagcattcgggagcctggagcataccgcgggtgaagtcgtattcaacacgggaatgaccggttatcaggaaattttatcagacccttcttactgcgggcagatcgtgacgctgacgtatccgctgatcggcaactacggaattaacagagatgactttgaatctatcactccttttgtaaaagggctgatcgtaaaagaactgtgcgagctgccttccaactggcgctcagcttacacgcttgatgagtatctgaaaatgaaaaaaatccccggcttacaagggatcgacacgcgaaaactcaccagaatgatccgcacggccggggcattaaaaggaacgtttgcttcaagtgaggagaatgtcggagaggttcttgcaaggctgaaagaaacggaactgccgagaaatcaagtcgctcaagtatcggcgaaaacggcatatccgagtccgggccgcggcaaacgcatcgtgctcgtcgatttcggtatgaagcacggcatcttaagagagttaaacaaaagaaaatgcgatgtcatcgttgtaccgtacaatgtaacggcggaagaagtgcttcagctcaagccggacggcatcatgctttctaacggacccggagatccgaaagatgtgccggaagccattgaaatgataaaaggcatactcgggaaggtgccgttattcggaatctgtctcggccatcaattatttgcgctggcatcgggagcggaaacggaaaaaatgaaattcggacacaggggttccaatcatccggttaaagagcttgcgacagggaaagtcgctttaacagcccaaaaccatggatatacagtttcttcaatagatgagacagagcttgaagtgacgcacattgcgatcaatgatcaaacgatcgaaggactcaagcataaaacattgccggcatttacggttcagtaccaccctgaagcttcaccgggaccggaagacgccaatcacttatttgacagattcattgacttgatcgaaacaactgagaaagaaggggaagcggtatgccaaaacgcgtagatattaaaaagattttagtgatcggatcaggcccgattattatcggacaggcggcggaatttgattatgcgggcacacaggcgtgtctcgctttaaaggaagaaggctatgaagtcattctcgtcaactcgaatccggcaacgattatgacggatacggaaatggctgatcgggtatacatagaaccgctgacgccggagtttctcacgcgtattatcagaaaagaacggccggacgccatcctgccgactctgggaggacagaccggactgaatcttgccgtcgagctgtctgaactcggggttcttgaggaatgcggagtggaagtgctcggcacaaagctgtccgccatccagcaggctgaagaccgcgacttattccgtacgctgatgaatgagctgaatgaaccggtgccggaaagtgagatcatccgcactttacaggaagccgaggaatttgtcggccggatcgggtttccggttatcgtgcgccccgcttacacattaggcggaacgggcggcggcatctgctcgaatgaagcggaactgaaagagatcgtcgaaaacggattaaagctcagccccgttcatcagtgccttctggaaaaaagcatcgccggttacaaagagatcgaatatgaagtcatgagagacagcagagatcacgcgatcgtcgtctgcaacatggaaaatatcgatccggtcggcatccatacgggcgacagcatcgtcgttgccccgagccagactttgagcgaccgggaatatcagcttttgcgcaatgtttcattaaagctgatccgcgcgctcggcattgaaggcggctgtaatgttcagctcgcgctcgatcccgacagcttccaatattacattatcgaagtgaatccgcgagtgagccgctcatctgccctcgcttcaaaagcgacgggttacccgatcgcaaagcttgcggcgaaaatcgcagtcgggctttctcttgatgaaatgatgaatcccgtaacgggaaaaacatatgcggcttttgagcccgcgcttgactatgtcgtttctaaaatcccgcgctggccgttcgacaaatttgagtcggcaaaccgcaggctcgggacgcagatgaaagccaccggagaggtcatggccatcggacgcacccttgaagaatcgctgttaaaggcggtccgctcactggaagccgatgtctatcacctggaactgaaggatgcggaagagatttctgacgggcttttggaaaaacggatcagaaaggccggagatgaacggctgttttatcttgcagaagcgttcagaagaggctacacagtggagcagcttcatgagttttccgcaattgacgtattctttttgcacaagctctgtaagctggtcgcttttgaaaccgagctgaaagcggaaaaaggcagcctcgccgtcctgcagacagcgaaggaactcggtttctccgacaaatatatcagccgggaatggaatatgccggaacaagagctgtatcaaatgcgaaaagaagcagccatcaagcctgtatataaaatggtggatacatgcgcggcggaattcgaatcagaaaccccgtacttctacagcacatatgaggaagaaaacgagtctgaggtaacatcaagaaaaagcgtcgtcgtcctcggctccggcccgatccgcatcggacagggcgtcgaatttgactatgcgaccgttcactctgtctgggcgattaagcaggcaggatatgaagcgattattatcaacaacaaccctgagacggtgtccactgatttcagcatatcagacaaactgtattttgaaccgctgacggtagaagatgtcatgcacatcattgatttggaacagccggaaggcgttgttgtccaattcggcggccagacggcgatcaaccttgcggaagaattgagcgcccgcggcgtcaaaattctcggtacatcacttgaagatttagaccgtgcggaagaccgggataagttcgagcaggcgcttgaggcgctgaatgtgccgcagccgctcggaaaaaccgccgtgtcggtgaacgaagcggtcaaaatcgctgcatccatcggctatccggtacttgtccgcccttcgtatgtgctcggcggccgggcgatggaaatcgtctatcacgaagaagaactgcttcactatatgaaaaatgcggtcaaaatcaacccgcagcatccggtgttaatcgaccgttatctgacggggaaagaaatcgaagtcgatgccgtatctgacggcgaaacagtcgttattccggggattatggagcatatcgagcgggccggcgtccattcaggggattcaatcgccgtctatccgcctcagtctttaagcggagacattaagaaaaaaatcgaacaatacactgttgccttggcaaaaggccttaacatcatcgggttgctgaacatccagttcgtactttcgcaaggtgaggtgtatgtgcttgaggtaaatccgcggtcaagcagaaccgtgccgttcttaagcaaaatcactaagattccgatggcgaatctggcgacaaaggtcattctcggccaaaagcttgctgatttcggctatcaagaggggctgcagcctgaacagcagggggtgttcgtgaaagcgcctgtcttctcattcgcgaagctgagaagagtggatatcacgttaggccctgaaatgaagtcgacgggagaggtcatgggcaaagattcaaccttggaaaaagcgctctataaagcgctgattgcctcaggcattcaaatcccgaactacggttcagtgctgttgaccgttgctgataaagataaagaagaaggactgctgatcgccaagcggttccacgccatcggctataaaatcttggcgacggaaggaacggcggcttatttgaaagacgctcagattccggctcaagtcgtcgggaaaatcggcgaagaagggaaaaatctgctcgatgtgatcagaaacggagaagcgcaatttgtcatcaatacgctgacaaagggcaaacagccggccagagacggcttcagaatccgccgcgaatccgttgagaacggagtcgcctgcctgacatctttagatacggccgaagccattttgcgggtattggaaagcatgacattccgggcggatcatatgcctgcatccgaaaccaatcaaaaggcggcagtcacgatatgaaaaaagcgcatttgactgttcaatccaacttagaaattgccgaccggatttataagatggtgctgaaaggagagcttgtccggcaccttaccgagccgggacaatttcttcatctgaaggtgagtgacgcggtcacaccgctattaagaagaccgctcagcattgcggacgtcaatttcgccgcggatgaagtatccgttatctacagagctgacggtgagggaacgcgccttttgtccgggaaaaaagagggcggcaaaatagacgttctcggccctctcggcaacggatttcccgtgcggcggattgaacccggcaaaaccgcgctgttagtcggaggcggagtgggggttccgcctttgcaggaactgtcaaagcgcctgacggaaaaaggcgtaaacgtcattcatgtgcttggatttcaatcagcaaaggatgttttttacgaacaggaatgccgtgcgtacggagacacttatgtggcgacggctgacggaacatatggagagaaaggatttgtcaccgatatcatccgtgaaaagcagctcgaattcgatgtcctgctaagctgcggaccgacaccgatgctgaaagctctgaagcagcagtacggccataaagaggtttatctttcgatggaagagcggatgggctgcggcatcggggcctgcttcgcctgcgtgtgccgcacgggtgaaagcgatacatcctatgtaaaggtctgccttgacgggccggtatttaaagctgaggaggtggcgctgtaatgttagaggtgaatctgccgggtctccaattgaaaaacccgatcatccccgcttccggatgtttcggtttcgggaaagaatatgccggattttacgatttatcatgccttggaggcattatgattaaagccacgacgaacgaagcccgcttcggaaatccgacgccgagagtggcggagacaagcgcgggaatgctgaatgccatcggactgcaaaatcccggccttgagcatgtgctcaatcacgagctgccttggctcgaacaatttgacacgccgattatcgcaaatgtcgccggttctcaggtggacgactataaagaagtggccgagcacatcagccaagcgccgaatgtgcatgcgcttgagcttaacatttcatgtccgaatgtcaaaacggggggattgcttttggtactgatcccgtcatggcggccgaactgacaaaagcggtgaaagaagtttccgcagtgcctgtgtatgtgaagctttcgcctaatgtcgcaaacatagccgaaattgccaaagcgattgaagcggccggtgctgacggtctgacgatgattaatactctcatcgggatgaggctcgatctcaagacgggccggccgattttagcaaataaaacgggcggactgtcaggcccggcgatcaaaccggtcgccatccggatggtatacgaagtcagccaggccgttcaaattccgattatcgggatgggcggcgttcagaccgcagaggatgcattagaatttcttcttgcgggagcgagtgcggttgccgtcggcacggcgaacttcgtcaatccgttcgtctgcccggaaatcatagaacagctcccccacgtgctgcgccaacacggctttcaatctgtaagtgaatgcatcggaaggagctggaaacatgaaaaacaacctgcccatcatcgcgcttgattttgcatcaggggaagagactttaacgtttttagacttgtttgaaaaggaaaggctctttgtcaaaacggggatggaacttttttatcaggaaggccccgccatcattcaccaattaaaagaacggaactgtgatatatttttagatttaaagcttcatgatatcccgactacggtcaataaagcgatgaagcggctggccggcctcggcgttgatctcgtcaatgtgcatgcggcagggggcgcacgcatgatgcgcgcggcccttgaggggcttgaagaaggcacgccggcaggcagaaaacgcccgtctttaatcgcggtgactcagctgaccagcacttcagagcaggtggcgaaggaagagcttctgctgcataagccgctgttagaaacggttgtgcattacggcaaaatggcggaagagtgcgggctggacggagtggtatgttcggtccatgaaacaaaagccatttatgaagcggtccggccttcatttctgacagtcacgccgggcatccgcaccgccagtgacgcagctgacgatcaagtccgtacggcgactccgtcatttgcgaaagaaaacggttcgtcagccatcgtcgtgggccgctcaattacaaaagcggaaaaccccgttaaagcatatgaagcaattaaactggaatgggagggcgttcgccgatgaaacaggctatcgcaaaacatctattacacattgaagctgtctttttacgcccgaatgagccgtttacgtgggcgagcggcattttatcaccgatctattgtgacaaccgtctgacattgtcgtatccaaaagtgagaaatgatgtggcggacgggctcggcaaactgctgaaggagcatttccccgaggcggagatgatcgcgggcactgcaacggcgggcattccgcatgctgcgcttctcgcagaccgtacaggcgcgccgatgtgctacgtcagaagcaaaccgaaagcgcacggcaaaggaaatcaaatagaaggcgccattaagaaaggacaaaaaacagtcgtgattgaagacttgatttctaccggaggcagcgtgcttgaagctgcggcggcccttcaaagagagggcgcggaagtcctcggcgtcatttccatttttacatacggactgccgaaagcaacagaagcctttaaaaaagcgggtcttccttattactcgttaaccgattatgacacgctgattgaagtcgcgcttgaaaacggtacgattcattcagctgacattgaaaaactgaaatcatggaaactgaatcccgagtcaaaagattggtttaaaaaataatgacaataaaaacaggcctcagggcctgttttattattcctatcaaaaaactcgggttgacttctgttagaattgtgctaaaatttagtacaaatctaaaaagcttatcaagagcggctgagggactggaccgatgacgcccggcaacctgcgtgtattgcaaggtgccgcatccagaaaaatgcacagcattttgaagataagggctataccgggtcactgtctttcattccgctggattgaaagttttttatatgaaaaaaagattgagggataagacaaccggcagagaacaacaactgtttgattgtctccgggaggaggaaagaaaaaatgctaacgtatgatacatgggaggaaccggcgattacatttccggaagacgattcctataaaggcgcgctgtccgttttaaaatgggcatacggccactacggagaccagcttgtttacgcgtgcagcttcgggattgagggcatcgtcctgatcgatttaatttctaaagtaaagaaagacgcggaaatcgtgtttctcgatacgggtcttcactttaaagaaacatatgaaacgatcgaaaaagtgaaagaacgttatccggggctgaacattatcctgaaaaagcccagccttactctcgaggaacaggccgaggctcacggagataaactgtgggaaagagaaccgaaccagtgctgctacatcagaaaaattctgccgttaagagaagcgctcgcagggcatccggcatggctgtccggccttcgccgggatcaagggccgagccgggcgaatacgaatttcctgaataaagacgacaagtttcaatcgattaaagtatgcccgctgatccattggacatggaaagacatctggagatatacttccaagcatgagctggattacaatatcctccatgatcaggggtatccgagcatcggctgtgaaccgtgcacttcacctgcgtttaccgcggaagatttgcggagcggcagatggaacggcatggcgaaaacagaatgcggactgcatgaataaaggagctgcccgatggaattagccgctattttattctgtctgttttttgccatgaatatcggagccagcggagccgcggcatcaatgggagtcgcttacgggtccggcgccgttaaaaagaaaacgtatgcgctgatcatctgcgcggccggagtcctgtcaggggcggttatcggcggcggtgaagtcgttaagacgatcagcggcggaatcattcccgaacaaaccattacgctcaccattgtctgcattataatcggagcggcggcgctatcgttattcacggcgaatgtgctcggcattccgctgtcgacgagtgaggtcactgtcggggcgattgtcggtgtcggcgtcgcgtacaaagtattgtttttacagcatcttttggtcatcgtgattttttgggtgctcgtaccgttcgtcgcgttctgtttcacttttctcgtatcgaaggtattcagttctctgaatattcgagtcatttcgaaacggaaacagaagattttaggaattgtgctgctttttgcggggttttgggaagctttttcagccggaatgaacaatgtcgcaaatgcggtgggccctttggtggctgcgggcgtactcagcgtgtcaaaaggaacgctgtacggaggcatctttgtcgctctcggcgctctgcttttaggacgcaaagtgcttgaaaccaacgggaaaaagattacgaggttttcagccggagaaggcatactgctttcaggaaccggtgcggggcttgtcattatcagttccgtcttcggtctgccggtcccattggcgcaagtcacatcatcatcaattatcggtatcggaatggccaaaaacgggccgaacgtttttcataaagaagtcgtgaaaacgatgctcaaagtatgggttgtttcgccgtttttgtcactgtcgatttcgtatctgcttgtctccctgctgttaaaaggagattactattccatctttatgatggccagcgtgcttttggcagctggcggagccgccagtctgatgaaagccatccgaaaagagaaacgctctgtccatgaacaaggcgggggcatttaactattaatctgagtttatttatctgttaactgggaggaatcatgtattatgagtttagcaccgcacggaggaacattaattaatcgggtgaatgagcagtatgatcttacatccgtccacaaagaaattgagcttgatttgatttcgttcgctgatttagagctgatcgggatcggggggtacagcccgattgaaggatttttcacagaaaaagattacgtatcagtcgttgaaaatatgcgtctagcatcagggttgtctggtccctgccgatcacgcttccggtcgattcagaaaaagcggctgagcttgccgtcggcgacacggtgaaactgacttacggcggagaaacatacggcgtcgtcgacatcgaagatatttatacgccggataaacaaaaagaagccgttcacgtatataaaaccgatgatgccgcgcatccgggcgtgaaaaaattattttcacgcggcgatacgtatgtcggcgggccgatcacattaattaaaaaagcgtcaaagcagtttcctgagtttacatttgaacctgccgatacaagacgaagcttcgaagaaaaaggctggaaaaccatcgtcggtttccaaacgagaaatccggtccaccgcgcccacgaatatatccaaaaaaccgcgcttgagacggttgacggcctgtttttgaacccgctcgtcggtgaaacaaaatcagatgacattccggcggatgtcagaatggaaagctaccaggtgctgctcgatcattattatccgaaagaccgcgtattcctcggcgtgtttttggcggcaatgcggtatgcggggccgagagaagccattttccacgcgcttgtccgcaaaaactacggctgcacgcattttattgtcggccgcgatcatgccggcgtcggtgattactacggcacatatgaagcgcaagagctgtttgatcaatttacagcggatgaactcggaattacaccgatgaaattcgagcacagcttcttctgccagaaatgcggcaacatgggaacggccaaaacatgtccgcatgacagagaagaccacgtcattctgtcaggaacaaaggtcagagaaatgctgcgaagcggcgtcatgccgccggcggaattcagccgtcctgaagttgtcgaggtgttgattaaagggctgaaaacgaaagaagaagcaggcgtttcttaaggaggaaaatagagtgacaaatcgtgatatcgtatggcatgaagcctcaataacgaaagaagaataccagcagaaaaacaagcataaaagctctatcctctggctgacgggcttaagcggttcagggaaatccacaattgcaaacgccgcagcgcgcgagctgtttgaacaaggctatcaagtcattgtgcttgatggggataacatccgccacggcttaaacaaggacttaggtttttccgatgatgaccgcaaggaaaatatacgccgcatcggggaagtggcgaagcttttcgttcagcagggaaccatcgtcatcacggcttttatttctccgttccgtgaggacagagatcaggtgagagagcttgtggcagagggcgaatttaatgaaatctacgtgaaatgcgacctcgatatatgtgaaaagcgcgatccgaaagggttatataaaaaagcaagaaatggtgaaattccgttctttacggggatcgactcaccgtatgaagagccgaaagcgcctgagctcgtacttgattcaggcaaatttgaacgtgaagaatgcaccggaagactggttgactttgtgaaaaacagcttagcataataggtccaaaaaggccgcgcaatcagccggatatcccccgcaatggcgggatatggtaaaatagctgaagtgcggcctcgcggctgttctgggaagatttcaaaacggatcggggagacatgctatggggaaagtatttatcgttggagccggtccgggagatccggacttattaacggtgaaggcaatgaaagccatacagaaagcggacgttatattatatgacagattggtaaacaaagagattttacagtacgccggagaagaagcggatctgatttactgcggcaagctcccggattttcacattatgaaacaggatacgatcaaccgtttccttgtgaagtatgcgaaaaaggggaaaaccgttgtaaggctcaaggggggcgacccgtttgttttcggccgcggaggcgaagaagcggaggctctcgcgcaaaacgccattccgtttgagatcgttcccggcattacatcaggaatcgcggctgctgcttatgccggcattccggtgacgcacagagaggcgagctccaatgtcgcattcgttacggggcattataaacaagaagacgactttgaagaaaaatggaaagcgctggcgacgggcattgatacgctggtgatttatatgggaattaaaaatatccggcagattgaaagaatgctgctggaaaacggcagagacggcggcactccggcagcctttattcattgggggacgacggacaggcaaaaaacagtcgtctgcaccgtcggcacgctttcagacacagtgataaaagaagaaatcaaaaacccgagtttaattgttatcggtgatgtcgtcaattatcactgcatactggactggtatgcatctgatcagaaaaatccggatttgagcgaggcgttgtaaatgaagcaggcgattttatatatcggacacggaagcaggctgaaaaaagcgcagacagagtcggcggcgtttttaaaagggtgcatgccacacgctgacgctcccattcaggaaatctgttttttagaactgcaggaaccgtctattgaagcgggatttgaagcttgtgtcagacaaggcgccactcatattgcggctgtgcctttgctgctgttgaccgctgcccacgcgaaacatgacattccggctgaaatcgcccgtgcggcggccctgcatcccgatataaaagtgacatatggtgttccgatcggagtggacgatgaagtcgtaaaagccgtgcatcatcgcattgaagataccggagtgtccattgagcaggcgaaagtggtgctgatcggaagaggaagcacagatccggcagttaaaagcgcagtcagtgagattgccggaaaacttgaggcgattacacctgttaaagaagtcatcccttgttttttaacagcatgtgacccgcactataaagaagtgtttgccggccttgaagaggatgacggagcacccgtttttatcgttccatatcttctgtttaccgggcttttaatgactgagattgaacgggaagttcaaaagcttcaaacggtcaatcaaaatgttcatctcgcttcatacttaggttttcacccgcatattaagcaggcgtttttgaaccgtgtgacggaagctgtccgaaaccccggcgggcagtttgattttaaggggggacagtatgctgcctctgcacattaatctcagcggaaaaagaattgtcatcgcgggcggaggcaatgttgccttaagaagactcaaaacagtgctttcggaaggcgcggatattactgtaatcagtcccgatgccctgcctgaaattaaacagctggcggatgaaggacgtatccgctgggtttcccgtaaaattgacatgaaggatctcgcgcccgcttttttcatcattgccgcgacaaatgaccgcaacgtgaatcgggagataaccgagggcgcttctgaaacgcagctggtcaattgtgtaagcgaggctgaacggggcagcgtgtatatgccgaagatcatccgcaaagggcgcattcaagtatccgtatcaacaagcggcgcaagccctgcacatacgaaaagactggctgaggacataaagcctctcattactgctgatttggctgaagaagtggatcgattatttgagaaaagaagaagaccataaaaaacaccctgtctgtcatcaggcagggtgttttttatactgtcctgacagtccgccgaatgtgaaaaattcaaaacgaaagcgggcagtttgaatggtatatgccgacaagcggtcaggattgcgaagtgatgcggaatatgtatgtgatcccgatgccgcctggatttcgcccgcatacaaaggaaaggtcagagacccgcccggatgtgctcaggttcggcgagggaaggtgaaagtatccgccgccaaatcaggtgtgaccgtttaaatcacagacggcccggcggatcatgcagacatgacgggaaactgatcagatactgtaaagatcggttctgacggctgggagagtttcgtctccgtttatacgtaataaaaaacacttccaagccgagtgcgggtttcagcttggaggtgcgtttattttttcagccgtatgacaaggtcggcatcaggtgtgacaaatacggtatgctggctgtcataggtgacaaatccgggctttgcgccgtttggctttttcacatgtctgatttttgtataatcaaccggaacggagccggaatctttcgctttggaaaaataagcggcgatcgcagccgcctccagtatggattgttcatccggatcgctgcttttaatcacaacgtgggaacccggaatgtctttcgtgtggaaccataaatcatccctcgcggcagcttttgtcgttaagtactcattttgtttattgtttttgccgacaagaatcgtcaatccccgtgaagattcatattgctccaaaacaggaacgtgctgcttctgttttttctgtcctctctgctgtttcggccgcagatatttgccttccacaagctcttcccttatttcgtgaatatcctttgtggaggcggaggagagctgctggatcagctgatcgaaataagcgatttcctcctcggccagacggatctgttcttttaccacctcgacggaattcttcgccttttgatactttgtaaaatacatctgcgcgttttctgacggtgttttgttcggatttaaagggatggtcaccgtcttactttcttcatcataataattgatgacttccgcttctttgtcaccttttttcagcatatacaaatttgccgtcagcagttcgccgtatagctggaattccttcgcattttctgagtagtcgagcgtcttttccagcttttttatcttattggcattctttttccgttcatttgcgacaaaacgctcgagatcctgagcctgctgtttgacgcggtcgcgttccgctttgccgaaataaaaccggtccaacagctcactcagtgagtgaaaggtgcgctcctctccgtttacatgtgtgagagacaggagataaaagtattcctttccgccggctgtcgtaatgttcggtgtaaacctgcaatctttcacggcatggaacatttcaatcagcgtcttcggcagcgttattttgttagcgagacccgctctgtgcacggcttcttttgcaaacagcggagaaacaccggagaaatgtctgacgatctgctggtcaagccgtccttcctgaaaactgagataacgcaaaacgtcctcttcatccgcggcaagcggcgaaattttttcctgagcgggaggaagcttgtaatcatagcccggcagaacggtccggtagctgttcatcgacggagataaatgcttcagcccgtcgatgatggatccttctccgtcagtcagaataatattgctgtgccgtcccataatttcaacatacagcgttcttacggtttcgtcgccgatttcatttctgctttttatgcggaatatcataatccggtctaatccggcctgttctattttctcaataaatccgccttctatatgctttctgagcagcatacaaaacatcggcggctcgctcggattttcataggcctggtttgtcatgtgcacccgtgaatagctcggatgcgccgacaataataatttgtggtttgttccgttggcgcggatatggaatatcacatcgtgcttaaaaggctgatggactctcgtgatccgtcctccggcgatccggctgtttaattcatgtgtcattccgtatgtaaacatgccatcaaaagacatataaaacaccctttccttcttcctgcattcgataattatagcatgaaaagggacgagtcagaataagcttgtttacagagtgacatctctaaagcgaggcaggggagtggacgagaagaatgaagtttcatgaaatgggacaaaccgatttgctgaaagcaacaaatacgtccattaaacaggggttgaccgaaaaagaggtgaaaaaacgccttgaaaagcacgggccgaacgagcttcaggagggcaagaggacaccggcgatcgccgtgtttttcgcccaatttaaagattttatggtgctcgtgctgctggcggcaaccttaatatccgggtttttaggcgaatatgtagatgccgtagcgattatggcgattgtatttgtcaatggggttctcggtttttttcaagagcggcgggcggaaaagtctttacatgcattaaaagagctgtcaacgccgtatgtgtcagcgttgcgggacgggagctggaagaaaattcagtccaaggagctcgttcccggcgatatcatgaaattttcaagcggcgaccggattggcgcggatgtgcggatcgttgaagcgaaaagccttgaaattgaggaatcggcgctgaccggggaatcaattccggtggttaaacaagccgataaattgagaaagccggatgtttcgttaggcgacatcagcaatatggcgtttatgggtacgatcgtaacgcgcggcagcggtgtcggcgtcgtcgtcggtacaggaatgaatacggcaatggggaaaattgccgatatgctggaatccgccggcagcctttcaacaccgctgcagcgaagacttgaagagctcggcaaaattttaattatcgtcgcgctccttttaacggtattggtcgttgcagtcggcgtcttacagggacatgatctttacagcatgtttttggccggggtgtcattggccgtcgccgcaattccggaagggcttcccgccattgttacggtggcattatcaatcggcgtccagcgcatgatcaaacaaaaatcaattgtcagaaagctcccggcggttgaaacattgggctgcgcctctgtcatttgttctgataaaaccggcacgctgacacaaaacaaaatgaccgtcacccatatgtggtcaggcggcaaaatttataaagtgtcaggcatcggctatgtgccggagggcgttttcacccgagatgagcgggaaatcaagccgaaagatgagaagattcttgaacagatgctggttttcggcgcgttgtgcaacacatctgaaatcgcactgaaagacggccgttatgtactcgacggtgatccgacagaaggagcgctgctgacggctgcaagaaagggcggctattcaaacgattggctcagcgggcattaccgcgtggttgccgagtttccgtttgactccgtccgcaaaatgatgaccgtcattgtagaggatcaggaaaaaaagcagttcgtcatcactaaaggagcgcccgatgtgctgattgaccgctcgtcacatctgatgcacggcgcaagaagtacgcctttttcaggagaaaagaaagcagaaacggaagcggttctgaaagagctggcgtcgcaagctttgcgtacgattgcgattgcttataaaccgcttaagcccggagaaaagccgacaatggagcaggcggaaaaaaatctgacgatgctcggcttgtcaggcatgattgatccgccccgtccggaggtcagacaggccattaaagaatgccgtgaagccggcattaaaacggttatgatcacaggggatcacgtcgaaacggcaaaggccattgcaaaagatttgcgtcttcttccgaaaaaggggcgtgtgatggacggcaagacgctgaatgagcttacggacaaagaacttatcgaaacggtcgatgatgtctacgtcttcgcacgcgtgtcacctgaacataaattgaaaatcgtcaaagcgttccaggaaaacggacacgtcgtcgccatgacgggagacggggttaatgacgcgccggccataaagcaggcagatatcggtgttgccatgggcgtgacgggaacggatgtggcaaaggaagcctcttctctcattctggtagatgataactttgctacgattaaatcagccataaaagagggacggaatatctatgaaaatataagaaaattcgtccggtatttgctggcctccaacgtcggtgaaattttagtgatgctgtttgcgatgcttctcgctctgccgctgccgctcgtcccgattcagatattgtgggtgaacttagtcactgacgggctgccggcgatggccctcggtatggatcagccggaaggagacctgatgaggcggaagccgcggcatccgaaagaaggagtgtttgcgagaaaactgggctggaaagtcgtatcaagagggtttttaatcggagccgcaaccattttagcgtttatcatcgtctatcaccgcaatcctgaaaatctgccctacgcacagaccgttgcattcgcgactcttgtcctggctcagcttatacacgtgtttgactgccggagcgaaacgtctgttttctcccggaatccgtttgaaaatatttatctgctcggcgccatcgtttcttctgtcttcctgatggccatcgtcatctattatccgccgctgcagccgattttcaaaacagtgccgattacgccgggcgattggatgctgattatcgggatgtctggcatacctacttttttgctggcgggttcacttttgacaagaaaaaaataattccatatgatataatcttaggggtaatagcatgtctattgcccttttattttgataacgggaaagaattgggtgtttcatatgatacggagtatgacaggcttcggcagcgcaagcagcacaaaaggcgatctctcggcaaccgttgaattgaaatccgtcaattaccggttcaaagaagtgaacgcccgcctgccacggcctttgctatatgtagaggataagctgaaacaaacgatattgcagcatatacagcgcggaagagtagagctgtttctcactgtcaacagtgacgcgctcataaaaagaagcctgaacatcgattgggagctccttgatgaatatgtgagcgccgcacgcgccatgaaagagcgctacagcctggccgcagaacccgatgcaatggatttctttagatttgaacatattgcgcagattcacgaagaacagatgcgtgatgacaagcttgaagaagtcatcagggaagccgctgagctggctgtaaaggaactttgtgacatgagggaaaaagaaggccggcttttggcggaagactgctttctgcacattgagcggcttgagacgctgtccgaacaggtgaaagagcgcgcttcggccgttgttattcaataccgcgagcgtctttacgcccgaatgaaggaatggacggaggacgcgctcgacgaaagcaggctgatcacggaatgcgccattttcgccgatcgttctgatataacggaagaaattaccagattgaagagccattttgttcaattccgtgatatattaaaagaaggcggggcagtcggccgcaaacttgatttccttgttcaggagcttaaccgggaagcgaacacgatcggctcaaaagccaatgatcatcaaatcacaaagcttgtcgttgaaatgaaaagttctattgaaaaattgaaggaacaagtgcaaaatatagaatagcgactgtgcgtattgtttacagacggtctcttcaggttacactagagacgtctattttacagggggaacgtagaagatgacgattaaactgattaatatcggatttggcaatatcatctccgccaatcggatgatttcgattgtcagcccggagtctgcgccaataaagcgaatgatccaggatgcaagagaccgcggaatgctaatagacgctacatacggacgaagaacccgtgcagttgtcgtcatggatagtgatcacattatcttatctgccgtccagcctgagacagttgcacacagactttctgtgaaagaagaaattatggatgaagggcaggggtaattgccgcatgaaagaaagagggttattaatcgttctctcaggtccctccggagttggaaaaggaacggttcggcaagcaatattttcacaacaggacacgaaatttgaatactcaatttcagtcacgacgagaaacccgagagagggcgaggtcgacggcgtcgattatttctttaaatccagagatgaattcgagcgcatgattgaaaacaacaaactgcttgagtgggcagaatatgtcggcaactattacggtacgcccgttgattatgtcgaacagacgcttcaagaaggaaaagacgtcttcttagagattgaagtgcagggcgcgctccaagtgcggaatgcatttccggaaggcctgtttatcttcttagcgccgccgagtctttctgagctgaaaaacagaatcgtgacaagagggactgaaaccgacgatttaatcgaaaacagaatgaatgccgcaaaagctgaaatcgaaatgatggacgcgtatgattatgtcgttgaaaacgacgatatccaaacggcttgtgataagattaacgcaatcgttctcgccgagcacttaaaacgtgaacgcgttgctccgagatataagaaaatgctggaggtagaataacttatgttagatccgtcaattgactctttaatgaataaattagattctaaatatacgctggtgactgtgtctgcaagacgcgcgcgtgaaatgcagatcaaaaaggaccagcagattgaacataccatttctcacaaatatgtaggcaaagctttagaagaaattgacgcgggcctgctttcgtttgaaagagaagacagcgaataacaagcacacgtagcaacctatctctacataggttgttatttttttccgtttgggatttgtccaatgctttcataaaggaggagaagacttcatgaaaaaccgaaacattttgctatgcgtaagcgggggaattgccgtttataaagcttccgcactcacgagcaagctggttcaggccggcgcaaatgtcaaagtgattatgactgagtccgcgcgtgagtttgtttctccgctgacatttcaggcgctgagccggaatgaagtgtatacagatacatttaatgaacaaaatccgaaggtgatttctcatattgatgccgctgactgggcggatttaattattgtcgcgcccgctacggcaaatattatcggcaagcttgccaacggaattgctgatgatatgctcacaacgacggtgctggcggctgaggccccggtctgggtggcgcctgcgatgaatgtccatatgtatgatcatccggcggtgaaacggaacatctctgtgctttatcaggacggggtccgctttatcgagccgagtgaaggctatttggcatgcggatatgtcggcaaaggaaggctggaggagccggagcttattgttgagcgtgtcagagagcattttaaggagcctgaagacgatgcgccgctgaaaggaaaacatattgtcattacggccggtccgacgcgcgaagccgtggaccctgtccgcttcttcacaaataaatccaccggcaaaatgggctacgctgctgctgaagccgccgtccgtctcggggcgcgggtgacgctgatttcaggcccggtgtcaatagagccgccagtcgggctgtatcagtttcttcctgtgcaatcggcagccgatatgagagaagccgtgctttctgtgtttgattcatgcgacatggtgattaagacggcggccgtggccgattttacgccggcggctgtttctgatcacaaaatgaagaagaaagacggttcgctcgtgatcgaattcaaccgtacggcagacatactgaaagaactcggcgaacggaaaacacaccagctgctggtcggatttgcggctgaaacgcaagacgtcgaacgctatgcgcgcagaaaactcgaacagaaaaaccttgatatgatcgttgcgaatgatgtgaaagcggaaggggccggatttggcacggatacgaatgtcgtcaccttctatttccgggacggaagaaaacgggagcttgcgcttatgtctaaacttgacgtttcctttgaaatgctgaaggaaatgacagctttgaaagccgaggaccgaaaacccgtatgaatgtagcagaagtcattgtcgatgtcagctccaaaaacattgacagaccctttgattacaaaattcccgatcatttaaaagggatgatcgaagtcggcatgcgggtgattgtcccgtttggcccgcgcaagcttcaaggatttgtgaccggtttgaaagattcgtccgaattaaacggcggctcaatgaaggaagtcgagaagcttcttgatttgacgcctgttctgactgaggaactgatgcagctgtcttcatggctttctgacaaaacgctgtcgtttaaaatcacggcgcttcaggcaatgctgcccgccgcattgaaggcgaagtacgagaaagagctgaaagtcgttgacgaagaagcgctgacaccggacatcaaacagcttttcaggaatcaaaaaagtcttctgtactcggatattaccgatgaaagcattctttcgtcacttcagaaattcgtgcgtaaaggaagcattgatgtcacatataaagtcgcccaaaaaacgaataaaaaaatgatccgcatgattgaagcgggggcagacaaagaagaactcgcccggcacgcagattcattgacaaagcaggcttctaaacagctcgccgtgcttacttattttatcggcgggggagaaaagatttccgcggctgaactttgcaaaaagaccgattccagttccgcgacgctgaaaacgcttcttaaaaaggggcttcttacggaaagctttgaggaggtttaccgcgatccttatcaggacagaatgttcaaaaaaacagagccgctctctcttacagaagagcagcaggccgcttttgagccgattaaacaagctgtagccgaccatgtccatcacgtctttctgcttcacggcgtcacgggaagcggcaaaacggaaatttacctgcaatccattgaaaaagtgctggcaaaaggacaagaagccatcgtgctcgttccggaaatttcgttgacaccgcaaatggtcaaccgttttaaaggccgcttcggctcacaggttgcggtcatgcacagcggattatccacaggtgaaaaatacgatgaatggcggaagattcagcgcaaggaagtccggcttgtcgtcggagccagatcggccatctttgccccgtttgaaaatctcggcatgatcattattgatgaagagcacgaatcttcctataagcaggaggaaatgccgcgatatcatgcgaaggacgtagccatccgccgggccgagcatcacagctgtccggtcgtcctcgggagcgccacgccgacattggagtcatttgcgcgggcgaaaaaaggcgtttatgagctgcttccgttaaaacatcgcgtaaaccgccagctcatgcctgacgtttctctcgttgatatgagagaagaactgagaaacggcaacagatcaatgttctcaagagagctgatggaacagctggaagagaagcttgcaaaaaaagagcaggccgtcctttttctgaataaacgggggtattcctcgtttgtgatgtgccgggactgcggttatgtgccgcaatgtccgcattgcgacatttccatgacttatcaccgctacggacaaaggctgaaatgccattactgcggccatgaggaacctgtcccgggaacatgcccggaatgcggaagcgaacatatccgctttttcggcacgggaacacagcgtgtggaggaggagcttaccaaagtgctgcctcaggcgcgcgtgatcaggatggatgtggacaccacttcaagaaaaggcgcccatgaaaaactgttgtcagcgttcggtgaagggaaggcggatatcctgctcggtacgcagatgatcgcaaaagggcttgattttccgaacgtgacgcttgtcggagtattaagcgccgatacgacgcttcacatcccagatttcagggccgcggagaagacattccagctgctgacacaggtaagcggacgggccgggcggcatgaaaagccgggaacggtggtcattcaaacgtatacaccgtctcattacagcattcagctgacgaaaacgcacgactatgaaactttttttcagcaggaaatggcgcacagacgggcccagtcatacccgccgtattattacgtggcgctggtgaccgtttctcatgaagaagcggcaaaagccgcggtcaccgcagaaaagattacaaactatttaagagcgggatgcgggcctgatacgaaaattctcgggccggcggcttccccgattgccaggatcaaagatagatatcgctatcaatgcgtgataaaatacagacaggaaaacgagttgcagattcagttgaaaaagatactggagcactataaacgcgacattgcgcaaaagcatgtaatgatttcaattgatatgaatccgtacatgctgatgtaacattagtttttggagggcaaaattttggctgtaaaaaaaatcgtcacacacccggcggaggttctggaaacacccgccgatgaagtgacagtgtttgataaaaaattaaaaaaactgcttgacgatatgtacgatacgatgctcgaaatggatggcgtcggtctcgccgcgccgcaaatcggcattttaaaaagagcggccgtcgtggacatcggtgaagaaagcggccggatcgaccttgtaaatccggttattcttgaaaagagcggtgaacagaccggagtcgagggctgcttaagttttcccggggttttcggtgatgtcacccgcccggattacgtaaaggtaaaagcccacgaccgtaaaggaaaaccgtttattttagaagcggagggttttttggccagagccgttcagcatgaaatggatcatttagacggcattttattcacatcaaaaattacggcttactacactgaagaagaactggcagaaatggaaggatgattggatgacaaggatcgtttttatgggaacgcccgacttttcagttcccgtcctgcgcacgcttattgaagacggatatgaagtggttggtgtcgttacgcagcctgaccgcccgaaaggcagaaaaaaaatcatgacgcccctcctgtaaaggctgaagctgaacgtcacggcattcccgtgcttcagcccgaaaaagtaaggctcgaagaagaaatagaaaaagtgctaagcctgaagccggacctgattgttacggcggcattcggacagatcctgcccaagcagctgctggacggtccgaaatacggctgtatcaacgtacacgcgtcactattgcctgaattaagaggcggagcgccgatacattattcgattctccaaggcaagaagaaaacaggcgtgacgatcatgtatatggttgaaaagcttgatgcgggcgatatgatttctaaaatcgaagtggaaattcatgaaacggataacgtcggcacgctgcacgacaaattaagcatagcgggggcaaagcttttgtcagagaccgtcccgaacgtcatctccggaaatattaaaccgatcaaacaggacgaatcaaaagcgacttacgcgcctaacattaagcgtgagcaggagcggattgattgggcaaagcccggagaagagatctacaaccagatcagaggtttaaacccttggcctgtcgcctatacaactttgaacggtcaaactattaaagtatgggcttctgaaaaagttgcggcaaaaactgatgctgcgcccggaacagtcatccgcacggagcaaaacggcattgtcgtcgcatcaggaaacagcaccgcccttttaatcactgagctgcagccggcggggaaaaaacggatgaagggcgaagattttgtaagaggcaaaaatgtgcagcccggtgacgtgttaggagcagcaaatgaagaaaattaatgtccgggagctcgcccttgaagcgcttgagaagcttgagcaaaatcaggcatacagcaacctgcttcttacatcggttatcaaaacgaacacgctcagcgatcaggacagaggactgctgacagagcttgtctacggaacgctgcaaaataaaatcgccttagactatatgctgaagccttttatccgcaagccgaataaggtgaagccgtgggtgattcagctgcttcgtctgtccgcgtatcaaatggagtatttagaaaaaattccggatcgcgccgccatccatgaagcggttgaaatcgccaaaaaacgcgggcataagggcattgcgtcctttgtcaacggcattctccgctccctgcagcgtgagggggcgccgtcatttgctgaaattgaagacccggttctccgtctttctacagagacaagccatcccgaatggctcgtaaaagagtgggtcgaggcgtacggctttgaggcggctgaaaaaatctgccggattcatctcattccgccgaagcagacgctccgtgtcaatcacataaagagcgacagggaaacggtgctgaatgagatggagaatgccggtctggaagcggaagccggagacctttctcctgatgcgattaagcttttgaaaggaagcatcgcgaacacggcatttttccaaaacggccgggtatccatacaggatgaaagctcaatgcttgtcgcccgggcgctggacccgaagccgggcgaaaccgttttagatgcatgcgccgcaccgggcggaaagtcggctcacattgcggaactgatggagaacgaggggagcctcacatcgcttgatcttcaccgtcataaagtgaagctgattaaagagggcgcagaacggctcggtcttacgatcatcgacgcgcaaacgatggatgcgcgaaaagcgggagaggcctttggcgcagaacggtttgaccgtattctcgttgatgccccttgctcaggtttcggcgtcatcagaagaaaacccgatatgaaatatacgaagacgccggaggacagcagacggctgtcagaaatccagctcggcattttaagggaaatcgccccattagtaaaaaaaggtggcacactcgtatacagtacgtgtacaatggatcggacagaaaatgaagaagttatgcatgcgtttatacaagaacaccctgagtttgaacccgatttgtctcttgaaaagcggctgcctgaaaaggcgagaccctttgttcaggatggaagccttcaaattcttccgcattatttcggaacagacggtttctttattagcagcatgagaaagaagggataaaaatgacacaattaaaaaagacaagcgtacggaaagagctgcggactgagcagccgtccatttactcttttgaattagatgaaatcaaacaatggctgaccgagaatggcgaaaagccgttccgcgcagcacagatttttgaatggctctatgaaaagcgggtttcttcatttgatgaaatgacgaacctctcaaaaagcctgcgtgaaaaactcgagagcaattttgtgctgacaacgctgaaaacggctgtaaaacagacatctcaagacggcacgatgaaatttttatttgagcttcatgacggttatacgattgaaacggttttaatgagacacgagtatggtaattctgtatgtgtaacgacacaggtcggctgccggatcggctgcacattttgcgcgtcaacgctcggcggtctgaaacggaatcttgaagcgggagaaatcgtcgctcaagtcgtgaaagtgcaaaaggcgcttgatgaaacggatgaacgcgtcagctcagtcgtcatcatgggaatcggagagccgtttgataatttcaatgaaatgctcgctttcttaaaaatcattaaccacgataaagggctgaacatcggagcgcgtcatatcacagtttccaccagcggaatcattccgaagatttacgatttcgccgatcaaaaaatgcagatcaatttcgcgatttctctgcatgctccgaatacggaaatcagaagccgtctgatgccgattaacaaagcctataagcttcctgaccttatggaggccgtcaaatattacatcgagaaaacaggcagacggatcagctttgaatacgggctgttcggcggcgtaaatgatcaggtcgaacatgcagaagagcttgcagaactgttaaaagacgtgaaatgccatgtcaatttaattccggtaaactatgtgcctgaacgggattacgtccgcacaccgagagatcagattttcgcattcgaaaaaacgttaaaatcccgcggtgtaaatgtcacgatcagaagagagcaaggccatgacattgacgcggcctgcggtcagcttcgcgcgaaggagcgtcaagacgagacgaggtgaagaggttgattacagccttgaaaacagatacaggtaaagtccgccggcataatgaagatgcggcgggcattttcacaaaagaagacgcggtgcttgcggttgtcgccgacggcatgggcggtcatcttgccggagatgtagcgagcaggatggcggttgcggcgatggaagagcagtggaaccggaccgaaacggttccttctctgccgtccgcttgcgaggattggctgaaagaccggattcatgaggcgaatgtcaaagtgcatgaccacgctaaagccaatgaagaatgccggggaatgggcaccaccattgtctgcgccttattcacggggaagtttgtcactgtggctcatattggtgacagccggtgctacctgcttcaagagggggaattcactcagctgactgaggaccattcgcttgtgaatgagctggtcaagacgggggagatttcgaaagaggacgccgagcaccatccgcggaaaaatgtattgacgagagcgctggggacagatgaaaccatcagccccgacgcccgttcttttgaactgtctgacggcgatcagctgcttttatgctctgacggactgtcaaataaaatagaagatcacgagatcaaacaaatgcttcaagccgaatctgatcatcaggaaaaagtagaccttctcatcagcaaagcaaatcaaaacggcggcgaagataacatcacggctgtgttgattgagttttccgcagatgcaaaagagggtgaagacaagtgctaaccggcaagcggatcagcgggcgttatcatatcctccggcccattggcggcggcggaatggcaaacgtttttttagctgaggacatcattctcgaacgtgaagtcgcaattaaaattctgcggtttgactttgtgaatgacattgattttatcaggcgtttcagaagagaagcacagtcggcatcaagcctcgatcatccgaatatcgtcagtatttacgatatcggggaggaaggcgatatttattacattgtcatggaatatgtggaaggcatgacattaaaggaatacataaacgcacacggaccgcttcatccgaaagaagcgctgtccgttatggagcagatcgtctcggccatcgcccatgcccatcaaaaccatatcgtgcaccgggatattaaaccgcacaatatattgatagatcatttagggcatatcaaggtgacggatttcggcatcgccacagcgcttacgtctacgacaatcacacatacgaattctgtgctgggctcggttcattatttgtctccggagcaggcgagaggcggtctggcaacgaaaaaatcagatatttacgcgctcggcatcgtgctgtttgagcttttaacaggcaaaatcccttttgacggagaatcagccgtcagcatagcgctaaagcacctgcaaacagaaacgccttccgccagaaagtggaacccttccattccgcagagcgttgaaaacattattttaaaggcaaccgccaaagacccgtttcaccgctatgaaagcgccgaggacatggaggcggacatcagaacggcttttgacgccggcaggctgaatgaacaaaaattttccgtgcaggatgatgaggaaatgacaaaagccattcccgttattactgacggcccaaaagccgcgtctcaggcggaaacgccgggggagacggatgataaggaacagcagccagccaaaaagaaaaaacggaaatggccgtgggttttgctggccgtctgtttcatttttattatggcggctgttcttgcggtcaccgtgttcccgtctttatttatgcctaaagatgtaagcgtccccgacgtacggggcatgaagtacgaaaaagcggaagccctgcttgaaaagaacgggctccgggctgatcctgatataacggatattgaagatgaaaaaatagaagaggaattaatggtcaaaacggacccaaaagcggggtctaccgttaaagaaggctcttctgtaaaactgtacaaaagcatcggaaaaccgaaaacccagctgatcgacgtgaaaggacggcagatcggcgacgcaaaaaaagcgctgaaggaaaaaggtttcaaacatgtcaatgtcaaagaagaaaacgatgacagcgaggccggcaccgtaattgatcaggacccgtcagccggcaccgatatggtcgcaagcgatgatgaagtcaatctaacggtcagcctcggcccggcggacgttacgctgagggacttaaagacttacagcaaagaagcggcttcagggtatcttgaagataacggcctgcagcttgttgaaaaacaagcccattcagatgacgtgccggaaggacaagtcatgaaacaagagccgtcagccggcactgcggttaagccgggaagtaatgttgaagtgacgttctcgctcggacctgaagaaaaaccggcgaaaacggtaaaagaaaaaatcagcattccttacgaacccgaacatgaaggggaagagcttgaagtgcaaatcgccatcgatgataaggaccacagcatctctgatacgtatgactcatttaaaataaaagagccgaccgaaaaaacaattgaactgaagattgatcagggacagaaggggtattatcaagtgatggtcgatcataaagtcgtcagctacaaaacgattgaatacccgaaagataatgactgataaggagggaccctatgcctgagggcaaaattataaaagcgttaagcggattctattatgtcttggatgaatcacaggacaagatcattcaatgcagaggccggggcattttcagaaaaaataaaataacgcccctggtcggcgattatgccgtttatcaggctgaaaatgataaagaaggctacctgctggaaatcaaagaacgaacaaatgagctcatcaggccgccgatttcaaatgtcgatcaggccgttctcgtcttttctgccgttcagccggcgttcagcacgtctttattggaccgttttctcgtccttgtggaagccaacggcattcacccgatcatctgcataaccaaaatggacttagctgcagacggggaatcgaaagaggcgatactttcttacgtgaaagactatcaggcgatcggttatgacgtatatgtgacgtcatcaaaagaaaacagcggcttaacaggcattgtgaaacacttcgaggacaaaacgacggtgtttgccggtcagtccggagtcggaaaatcttcgcttttaaatgcgatcagcccggagcttgagctgaaaacaaacgagatttccgcgcatttgggacgcggaaaacatacgacgcgccatgtggagctcattcatacatcaggcggtctggttgcggatactccggggttcagttcgcttgaatttaccggcattgaggaagaagagctgggcagcacgttccctgagatcagagaaataagcgcctcctgcaaattcagaggctgtctgcatcttaaggagccgaaatgcgcggtaaagcaagcggtggaagaaggagagattcagccgtaccgctacgagcattacaaagaatttatgcaggaaataaaagagagaaagccgaggtattaatatgattaaggttgcgccatcaattctttccgccgattttgcttcactgggcgaggaaattaaagacgtggaaaaaggaggggcggactatatccatattgatgtcatggatggccatttcgtccctaacattacaatcgggccgcttatcgttgaagccgtccgtccggtgactgatctgccgctggatgtccatcttatgattgaaaacccggaccgctacatcccggcattcgcaaaagccggtgcggacatcctttccgttcacgctgaagcgtgtccgcatcttcaccggaccattcaattgataaaagagcagggggtaaaagcgggagttgtgcttaatccgcatacgcccgtccaaatgattgaacatgtgatcgaggagcttgaccttgtgctgttaatgacggttaaccccggttttggcggacagcgcttcattcattcggttctgccgaaaatccgtcaggtcaaacagctggctgaggagaaaggcctgtctgagcttttaatcgaggtggacggaggcgttaataaagaaacagcccctttatgcgctgaagcgggcgccaatctgcttgttgccgggtctgccgtatataatcagccggatcggaaaaaagccatcgctgacatccgaaacgcatcataaacatgctgaaaaagagcccggtgaaagccgccggctcttttcgcgtctaagagagaggatagcatatgaagacaatcaatatcgttgcgggcggcccgcgggagcttattcccgatctatccgaatacacagacggagatacgacgtgggtcggagttgataaagggacggttgctcttttggaggccggaatcattccgcaggaagctttcggtgattttgacagcattacggaagaggagctcatgcagattcaaaaagcggcgccggccctccatgtgtatcaggcggaaaaagattataccgatcttgaactcgcccttgactgggctttacaaaaagaaccggaaaacattcgggtattcggtgtgacgggcggaagagccgatcactttttagggaacatccagctgctgtataaagccttacataagcataccgatgtcaagctgatcgaccggcagaatgacattcagatgttcgggcccggccgttatacaattgaagaaaaagcgcgcagacgctatatttctttcattccgtttacggaagcggcagacggcctgacactcgacggttttaaatatccccttgataattgtcatattcctctgggttccacactatgtattagtaacgaactcattcattcacgaggtactttttcgtttgcaaaaggcatattaataatggtaaggagcgcggattagaaaagcggcttctgccatatgcggaaaaaaccatgaatcctaaagtgatgaacgcagcggatacgggacttataggaggggacaaaatgaaattttataccattaaattgccgaagtttttaggaggaattgtccgggcgatgctgggctcatttagaaaagagtaagcccaagaagctgaaatcgccctctttgaacgcataaaaaacgcctgccgcataaaagggcaggcgttcatttttgcttatacacgctcaactttaccggattttaaagcccgggcagatacatacacttttttaggtttgccgtcaacgaggatgcggaccttttgaaggttggcgccccaagtacgcttagaagcgttcattgcgtgagaacggttgtttccggcttttgtttttttacctgtaataaaacatttacgtgccatttgtttccctcctaactgcgcgaaacatctttttaaacatagtgtctcagatgctttcgttatacaatactttaaataatttaccacagctaaaaaccgtttgcaactattgtttcccttactttcaagaaaaatcacttgacatgtaaaaccaatcacatttccgcgctgaaggccgctgtctgtatcttttcttttcataatgggatacatatagtagaataatgataactctatgcacctgaaggaggaacctgtgtgtccattgaaatgaagacaaaatacggacagattgatatatccaacgaagtcatcgcaatggttgccggaggcgctgccattgactgttacggaatagtggggatggcctcaaaaaaccagattaaagacggtttgtctgaaatcctccggagagagaacttcgcaaaaggcgtacatgtccgtcaggaagccgaacaaatacatatcgacatgtacattattgtcagctacggcactaaaatatccgaagtagcccacaatgttcagacgaaggtaaaatacacagtaaatcaaacaatcggacttgcagttgattctgtaaatatttatgtccaaggcgtacgagtaacgaacccgtagtgaggaggatgagtattgtctagacgaaacttagatgggagagcttttgcggcaatgattctggcgggggctgagacattgtctcaaaacgcatccgcggtggatgcgctgaacgtgtttcccgtgcctgacggcgataccggaacaaatatgaatttatcgatgtcatccggtgcaagagaggtagagcacattgactcacccgacatcggcaaagtcggcatcgccctgtcaaaaggcctgcttatgggagcgagaggaaactcaggggtgatcttgtcccaattgttcagaggtttcacaaagagcattgaaaacaaaaaccaaattgatgcccaagagtttgccgcagcactccaagcgggagtggatatggcatataaggcggttatgaaaccggttgaaggaacgattttaaccgtggccaaggatgcggctaaaaaagcggtcgcctcggccaaagaagaaaccgatattatttcagtcatggaggccgttattgaagaagcggaagcgtcgctcaaccgcacgccggatctgcttcctgttttaaaggacgtcggtgtcgttgacagcggcggaaaaggtctgctttgtgtatatgaaggctttttggctgctttaaaaggagaggccgtaccgaaaaaagcggttcttccggcactcgatgatatggtgaatgccgagcatcataaaagcgcgcagagcatgctgagtacagaagacattgaattcggattttgtacggaagtaatggtgaggctggatcaagataaacggacgttcaaggaagaggcgttcagaaacgaactgagccgtttcggcgattcattgctggtcgtggctgatgatacgctggcgaaagttcatattcatgccgaagaacctgggaacgtactcaatctcgcacagcgttacggcgatctgattaaaattaaaattgaaaacatgagggaacagcatacttcaatcatcagccaagaacatgatgaaaaaaagccggccggcgttatgaaagaagcccgcaagccttttggcatcgtgactgtggcaatgggagagggcatttctgaattgtttacgagcatcggcgcttcacacgtaatcgaaggcggccagacaatgaatccgagcacggaagatattgttgaagccgttcagtctgtcaatgcggagacggttttcattcttccgaacaattccaatattgtgatggctgccaatcaggcggcgagcgtagctgaagaaaatgtcattgtcattccggcaaaaacggtccctcaaggcatgaccgccctgcttgcgtttaaccctgaccagccggctgatgtaaatgaagccaatatgcttgaggccatccggaatgtgaaaagcggacaggtgacatattcagtcagagacacccatattgacggcaaagaaattaaaaaaggtgattttatcggcattttaaacagttcaattatcggcagcgccgaagatcggataagtgcggcgaaattgctgctggatgaaatgatcggggaagaagatgaaatcgtcaccatcctgtacggagaggacgcgccggaagaagaagctgagaaactcgctgagtatattgctagcgtctgtgaagatatcgaggttgaaatccataacggcagacagcctctgtatccatatatatttgcggcagaatagaagggcttatcaggcccttctattcttatgcctttatttacctgcggcagtgcggcagtgtgcctgcttgccaattgagaaatgttcaattagtctaaagaaaagcgctgaatgaagtgatgttaaggaggagcaaaccagcatgaagtatagaagcgtttttgatattatcggcccggtcatgatcggtccgtccagttcacataccgcaggcgccgcccggatcggcagagtggccagaagcttattcaggcgtgagccccgccggatcgttgtgtctttttacggatcatttgcagaaacgtataagggtcacggcactgatgtcgcgattatcggcggcctgcttgattttgatacatttgatgaacggattaaaacagcgattcaaattgcggaagagaagggcatatatgtagagttccgtacagaggatgccgtgcccgttcatccgaatacggcgcgtatcgtcatttctgatgatgagggagagcttgcccttaccggtatttccatcggcggcggaaaaatagaaatcacggagcttaacggctttgagctgcgactttccggaaaccacccggctattttagtcgttcacaatgataaattcggcacgattgcaggcgttgccaatgtgcttgcgaaattctccatcaacgtcggacatatggaagtggcgcgtaaggacgtcggccagcttgcgctgatgacgattgaggtcgatcagaatattgaagaagaagtgcttgacgagctttcaacacttcctaatattatacaggttactaagatagctgactaaaaagtcaggaggaaaatgacatgtttcgtaatgtaaaagaattaatagaaatcactcaagaaaaacaaattccgatttcggaagtgatgatcacccaagagatggaagtgacgcaaaaaacacgagaagaaatctttcaaggaatggagcgcaatctctccgtcatggaagcagctgttgaaaaagggctgaagggcgtcacgagtcagaccggtttaacaggcggagatgccgtgaaacttcaggcatacatccaatcgggaagaagcctttcgggcaatctgattttagacgccgtttctaaagctgtggcgacaaatgaagtcaatgcggcgatgggaacgatctgcgctacaccgaccgccggctctgccggggttgtgccgggaacgttattcgccgtaaagcataagctgaaccctacgacagaacaaatgatccgttttctgtttacagccggcgcgttcggttttgtcgtagcaaataatgcgagtatttcaggagcggcaggaggctgtcaggcggaagtcgggtcagcatcaggcatggcagcggccgcgattgtggaaatggcgggcggaacgcctcagcaatcagcggaagcaatggcgattacactgaaaaatatgctcggtctcgtatgtgacccggtcgccggattggtagaagtgccgtgtgtcaaacgaaacgcaatgggagcatccaacgcgatgatcgcggcggatatggcgctggccgggattacaagccgcattccttgcgatgaggtgattgacgcgatgtacaaaatcggccagacaatgccgacagcactgcgtgaaacgggacaaggcggtttagctgcgacaccgacgggaagagaattagagaaaaaaattttcggaggagcgctgaaatcaagtgacacaccatcagcaaactagtatagcggaaattaagggcattgggccggaaacagaaaaaacattgcacgaacttggtatctatgacatttctgatcttctgaattatttcccttaccgttatgacgactatgagctgagggatttagaagaagtaaaacatgaagaaagagtgacggtagaagggaaggttcattcagaaccttctcttacctattacggcaaaaaacgaaacaggctgacattcagggtgcttgtcggcaattatttaattaccgcggtctgctttaaccgtccctacttaaaaaagaaactgacgttaggttctgtcgtcacgatatccgggaaatgggataaacacagacagaccgtttccgtgcaggaattaaaaaacggtcctcatcaagaagataaaagcattgagcctgtttattccgttaaagaaaacgtcaccgtaaaaatgatgagacggtttattaaggaagcgctgcagcatcatttggacagtgcggccgatccgcttcctgaaaaattgagaatccgctataagctgcctgattacaaacatgccctgcagacgatgcatcagcctgaaacgagggaatcgttacagcaggcaagacgacggtttgtttatgaggaattcttattatttcagctgaaaatgcaggcgttccgtaaagcggaaagggaacagtcaaaaggcatcagccatgtgtttcctgctgaaaagctcaccgctttcacagacagcctgccgttttcgctcacgaccgcacagacgcgcgtgcttcgggaaattaccgctgatatgacatccccttaccgaatgaaccgtctgctgcaaggtgatgtcggttcagggaaaacggccgtcgccgccatcgctttgtacgctgcgattctgtcggggcatcagggggcattaatggtgccgactgaaattctggccgaacagcatgcagattctctcgtatcgttgtttgcaaatgaagatgtaaatatcgcgcttttgacgagttctgtaaaaggaaagcggcgcagggagcttttggagcggcttgctctcggagagattgatattttagtagggacccatgctttaatccaggatgaagtggaattcaaagcgctgagtcttgttattacggacgagcagcaccggttcggggtcgaacagcgcaaaaaactcaagaataaaggtcaagatccggatgtgctgtttatgacagccaccccgataccgagaacgttggccattaccgtcttcggagaaatggatgtttccgtgatagatgaaatgcccgcggggcgaaaacaaatcgaaacgtattgggtgaaacacgacatgctggagcggattttggcttttatagaaaaagagctgaagcagggaaggcaagcctatattatctgcccgctcattgaagagtcggataaactggatgtacagaatgcgattgacgtatataacatgctgtctgacgtttaccgcggtaaatggaatgtcggcctgatgcacgggaagctccattctgatgaaaaagatcaagtgatgagagaattcagcgccaatcaatgtcaggtacttgtgtcaacaaccgtcgtagaagtcggggtgaacgtgccgaatgcgacgattatggtcatctatgacgccgaccgtttcggattatctcagctccatcagctccgcggccgggtcgggcggggagaccaccaatctttctgcatcttgatggccgatccgaaatccgaaaccgggaaggaacggatgagaatcatgtcagagacaaacgacggcttcgagctgtctgaaaaggaccttgaactgcgcggccccggtgatttcttcggaaaaaaacagagcggtatgcccgagttcaaggtggcggatatggttcatgactacagagctttggaaacggcccgccaggatgcggccaatctggtgtcttcagaggctttttggaaagatgacgaataccgcatgctgcgcggtcaattactttcaagcggcgtcctagaaggggagaaattaagctgattctgtaaaattcggcggctttcaaaaaacaatcattgcattccaatctatgagattatatactactattagtacctagtcttaattgtccggatggtgtttacagatgagaagaagcaagaaagaacgccaaaaattattgcagcagacgatcaaatcgacacccttcatcacagatgaagaattagcggggaaattcggcgtcagcattcagacgatccgtttagaccgcttagagctctcaataccggagctgagggaaagaattaaaaacgtggcagaacaaacgcttgatgatgaagtgaaatcattgtctttagacgaagtgatcggtgaaatcattgatctggagcttgacggccaggccatttccatattagaagtaagacgcgaacatgtcttcagccgcaatcaaattgcgcgggggcatcatttgtttgcgcaggcgaactcactcgccgtagccgtcattgatgatgagctggcgctgaccgcaagcgcaaatatccgctttacaagacaggtgaaagaaggcgagcgcgtcgttgcgaaagccaaagtgacggcagtcgaaaaagaaaaaggcagaacggtagttgaagtcaacagctatgtgggagaagaagtcgtgttctccggcagctttgacatgtaccgttcaaaacaatcataaaggtggagcatgcatgagaatagctgtagatgcaatgggaggcgacaacgcacccaaagctgttattgacggagtaatgaagagtattgaggcatttgacgatcttcatattacgctggtcggtgacaagacaacgatagaatcacacttgccaacaacatcagaccgcatcactgtgttgcacgccgatgaagtgattgaaccgacggatgaaccggtccgcgccgtacgcagaaagaaaaactcttctatggtgctgatggcgcaggaagtggctgaaaacagagcggacgcctgcatctcagcggggaatacgggcgcactcatgacagcgggactgtttatcgtcggcagaattaaaggaatcgaccggcctgcgcttgcgccgacgcttccgaccgtttcaggcgacggtttccttcttttggacgtgggagccaatgtcgatgccaaaccggagcatctcgtccagtacggaattatgggatctgtttatgcccggcaggttctcggaatcagctcgccccgcgtcggattgttaaatgtcggcacggaagaaaagaaaggaaacgacctgacaaaaaagacgtttgaattattaaaagaaacaaacgtgaattttgtcggaaacgttgaggcgagagacttgctcgaaggcgctgctgacgtcatcgtcacagacggctttacgggcaacgtcacgttgaaaacattggaaggttcagcgttatcgattttcaaaatgctgaaagatacactgacttcaagttttgtttctaagcttgcagcgggcgtgctaaagccgaagctgatggaaatgaaactgaaaatggactattctgagtacggcggggcgagtcttttcggtttgaaagcgcccgtcattaaagcgcacggctcttctgacgcacgcgctgtttaccatgcgctgcgccaggcgagagaaatggtcagccaaaacgtggccgcatttatagaagaagaagtaaaagaagaaaaaacagatgagtagtctggaggttaccgcatcatgagtaagattgcatttttatttcccggacagggatcacaatatatcggcatgggaaaagacctgtacgaacgcgaagaagcgtcaaaacgtatttttgatgaagcggatgaaacgcttgaaacaaagctgagctcgctcatttttgaaggtgacgccgaagaattgacccttacatacaatgcgcagcctgcgctgttgacaacgagcatcgccgtattggaaaagtttaaagaatccggcatcacccctgatttcaccgccggccacagcctcggagaatattcggcgcttgttgcggcgggagcgatgacatttaaagatgccgtttacacggtaagaaaacggggagaattcatgaatgaagccgtgccggccggagaaggcgccatggcagcgattctcggaatggatgcggagtccttgaaaaaggtgacggatcaagtgacggaaaacggtcatctcgtacagcttgcaaatctgaactgccccggccagatcgtcatttccggaacggcaaaaggcgtggagctggcttcagaggaagcgaaaaacaacggagcaaaacgggcgatcccattagaagtaagcggaccgttccattctgaattaatgaagccggcagcgcaaaaactcgaggaggtgctcagcgcctgtgagttaaaaaatgcggctgttcccgtgatttcaaacgtttcggctgacgttatgacggaaaaagacgatatcaagaaaaaactgatcgaacagctgtattcgcctgttcgctttgaagaaaccattaacaaactgattgacgaaggcgtcacgacgtttgttgaaatcgggcccggaaaagtgctttcaggccttgtgaaaaaagtgaaccgccgccttaaaacaatctcggtttctgaccatgaaaccatcgaactggcgattcaaacgctgaaggaggagaatcaggatgcttaatgaaaaaacagcagtggtaacgggagcgtcccgcggaatcggtcgggcgatcgcgcttgatcttgcgaaaaacggctgtaatgtagtagtcaactactccgggaatgaagcgaaagcgaacgaagtcgtagatgagatcaaatctttgggccgaaacgcgatcgccgtaaaagccgatgtatcaaattccgaagaagtacaaaacatgatgaaagaggctgtcgctgcattttcttcaatcgacattctcgtgaacaatgcggggatcacaaaagacaatcttctgatgagaatgaaagaaaatgaatgggatgatgtcattaacattaacttaaaaggtgtattcaactgcacgaaagccgttacaagacagatgatgaaacagcgctccggccggattatcaacgtatcatcaatcgtcggcgtcagcggaaaccccggccaggcaaactatgtggcggcaaaagccggtgtaatcggcttaacgaagtcatcagccaaagagcttgcgagccgaaatattacggtcaatgccattgctccgggctttatttccacggatatgacggacaagctttctaaagaagtccaagatgaaatgctgaagcagattccgctcgcgcgtttcggtgatccttccgatatcagcagcgttgttacgttccttgcttctgaaggatcgcgttatatgacgggccaaacccttcatattgacggcggaatggtgatgtaaagatttgtttttaaaatttcatcctagtttctctagttttttaaaaacgaatcctctataatacttgaggggaggtgaattgctatggcagatacattagagcgtgtaacgaaaatcatcgtagaccgccttggcgttgatgaagctgacgtcaaacttgaagcttctttcaaggaagacttaggtgctgattccctagatgtagttgagcttgttatggaacttgaagacgagtttgatatggagatttctgacgaagatgctgaaaagattgcaacagtcggcgacgctgtgaactacatacaaaaccagcaataagctgatgctaaaagtcccgcctgacagcggggctttagccctttaatcgttcggttaccggcgtctgacgctgtacgcgctgctgattccgtttacggcggggagcgcggtgaacctgatgtgcctatggaggttactatgtcaaaacactcacattttaaagataaaaaaaagttctataaaaaaatagagcaatttaaagagttccaagaacggatttcggttcattttcaaaacgagaaacttttgtatcaagcatttacacattcatcttatgtgaatgagcatcggaaaaagccgtatgaagacaacgaaaggcttgaatttttaggtgacgctgttttggaactgacgatctcccaattcttatttgccaaatatccggccatgagtgaaggagatttgacgaagctgagagccgctatcgtatgcgagccgtcactcgtctcacttgcccacgaattgtcattcggcgatcttgttctcttgggaaaaggagaagaaatgacgggcggcagaaagcgtcctgcgcttttagcggatgtgtttgaagcgtttatcggcgcactgtatctggatcagggccttgagccggttcagcaattcctgaaagagtacgtgttccctaaaataaacgatggtgctttttctcatgtgatggatttcaaaagccagcttcaagaatttgtacagcgggacggaaaaggatcgcttgagtacaaaattctcaatgaaaaagggcctgcccacaaccgggaattcgaggcgctcgtctctcttaaaggtgaggcgctcggtatcgggaacggacgttccaaaaaagaagccgagcagcatgcggcacaggaagctcttgcaaaattgcaaaaacatcatacgaaacaataaaatccccctgtatccctagggggatttcagtatgtctgcgcctgatataagcgggtgattatgataatattgagatacttatacgataaggaggatctgggatgttcctcaaacgtttagacgttataggatttaaatcatttgcagaacggatatccgttgactttgtaaaaggcgtcacggccgttgtcggtccgaacggcagcggaaagagcaacattaccgaagccatccgctgggtgctcggcgaacaatcagcccgctcgcttcggggcggaaaaatggaagatatcatttttgcgggaagtgattcgcgcaagcggctgaaccttgccgaagtcacgttaacgcttgataatgaagatcattttctcccgatcgattatcacgaagtcagcgtgacgaggcgggtgtaccgttccggagaaagtgaatttctcatcaacaatcagcagtgccgcctgaaagacatcattgacttatttatggactccgggctcggaaaagaagcgttctccattatcagccaggggaaagtcgaagagattctcagcagcaaagcggaagaccgccgcagtatttttgaagaagcggccggcgtgctgaaatataaaacacgaaagaaaaaagcggaaaacaaactgtttgagacgcaggataacttaaacagggtggaagatattctccacgagcttgaagatcaggtcgaaccgctgaaaatccaggcatcaatcgccaaagactacttagaaaaaaagaaagagcttgagcatgtcgaaatcgcccttaccgcctttgacatcgaacaactgcatagcagatggtcgggtttaaaagaaaaggtgcagacggcaaaacaagaagaattggcggaatcatcagctctgtccgcaaaagaagcgatgatagaagagacgagagataaaatccacgcgcttgatgaatccgtcaacgaactgcagcaggtgctgctcgtgacaagtgaagagctggaaaagctggaaggccggaaagaagtgctgaaagagcgcaaaaaaaacgccgcgcaaaaccgggaacagctagaggaatccgttacacattacacgaacaaagaagccgaactgaaagcggacattgaaaaacagtctgccgtctatgataaacttcgtgcggaagtgaagcggttaaacgcccaggtgaaagaaaagcagcaggctctcagtctgcataatgaaaatgtagaagagaaaatcgaacaattaaaaagcgattactttgaattgttaaacagccaggcgtcgattcgcaacgagctgcagcttttagatgatcagatgtcccaatctgcggtccagcaggcgagactgaccgcaaacaatgaaaaataccttgaagaacgtaacgatattgcagtccgcaaagcggcgtgcgaagaggaattggccgccgttgaagaggatattcacaatcaggtcgtccgctttcgcgaagtccagacagcatatgaacagaaaaaacgccagtatgaaaagaaagaatcagcgctgtatcaggcatatcaattcgtccagcaggccagatccaaaaaagatatgcttgaaacgatgcaaggcgatttttcaggattttaccaaggcgtaaaagaagtgctgaagcagaaagagcagctcggcggcatccgcggcgccgttctcgaactgattgcgaccgaacaaaaatatgaaacggcgattgagattgcactcggcgcagcggcgcagcacgttgtcacagacgatgagcaggcggcgcggaaagcgattcaatatttaaaacagaattccttcggccgcgcgacgttcctgccgcttacagttatgaaaccgcgccagcttcaaacccgtgatgaacagacggcttcaaagcatccgtctttcctcggcacagcgagcgggcttgtcacatatgatgcggcgtatcggaatgtcattcaaaaccttctcggcaccgtgctgatcactgaagatttaaaaggcgcgaatgaactggccaagcttctcgggcaccgctaccgcatcgtcacgcttgagggcgatgtcgtcaatccaggcggatcaatgacaggcggcgcggtcaaaaagaaaaacaattctctgctcggcagaagccgcgagcttgagacggtgactgcgcggcttgccgaaatggaagaaaaaacagctctgctcgaaaaagaggtcaaagcgctgaagcaggccattcaagagcttgaacatacgctgagcggtctccgtgaagacggtgaggctttcagaacaaagcagcaggatgtaaaaggcaggctgtatgaactcgaagttgctgaaaagaacatcaatacccatctggagctttacgaccaggagaaagcatcactgacggaaagcagccgggaaaaagagacgcgcaaatcagctctggaagaacagctgagtgaggcatccggccagctgaaagagcttgaggaagagatggaaaggctgacaaaacaaaagcagaccctatcctcaacaaaagaaacgctctctcatgaactgacggaatgtaaagtggccgctgcgaaaaaagaacaggcgtgctcgagtgaggaagacaacctcaaaaggctgaaaaaagagcttgaagaaacgcagctcgctctgaaagaaacacgggaagatttaagcctcctgacctcagagatgacgtccagcacaagcggtgaggagcagcttgaagaagcagcccatcataagcttcacgataaaacgagaacgatcgaattgatcgccagccggcgcgaccagcgtgtgaagctccagcgggctcttgatacgaacgagcttgagctgaaagagatgaagcgtctgtacaagcaaaaaacggacattctgaaagatgaagaggtaaaactcggccggatggaagttgagcttgataatctcttgcagtatttacgcgaggagtacagcttatcctttgaaggggcaaaagaacaatatcagcttgaactcgagcctgaagaggcgagaaaacgggtcaaactgatcaagctttcaattgaagagctcggaacggtcaatctcggcagcatcgatgagtttgaaagagtaaacgaacggtatcagtttttaacagagcagaaaaatgacctgacggaagcgaaaaacacactgtttcaagtcattgaagaaatggattctgaaatgacgaagcgattccatgaaacgtttatccagatccgttctcaattcaacgacgtgttccgttctttattcggaggaggacgggctgaactgaagctgactgatccgaatgatcttcttaattccggggtggacattatcgcgcagcctccgggcaaaaaactgcaaaacttaaatcttttgtcagggggagaacgggcgctgactgccattgcccttttattctctattctgaaagtaaggcccgtgccgttctgcgtccttgatgaagtggaagctgcgcttgatgaagccaatgtattcaggtttgcgcaatatttaaaaaaatacagcggcgacagccagtttatcgtcatcacccacagaaaaggcaccatggaagaagcggatgtcctctacggtgttacgatgcaggaatccggcgtttcccgaatggtttcggtcaaactggaagaaacaaaagaatttattcagtaacgaggaaagaggttgaaagatgagcttttttaaaaaattaaaagagaaaatcacgaaacagacagactccgtctctgaaaaatttaaagatggtcttgaaaaaacaagaaattccttctcaaataaagtgaacgaactcgtctcccgctaccggaaagtcgacgaggatttcttcgaggagcttgaggaagtgctgattggcgctgacgtaggttttacaaccgtcatggagctgattgatgagctcaaaaaagaagtgaagctgaaaaacattcaggatcctcaggaagtgcagtccgtcatttctgaaaagcttgtcgacatttataacagcggcgacgaacagatttctgaattaaatattcaggacgggcgcctgaacgttattctgcttgtcggggtaaacggcgtcggaaaaacgacaacgatcggaaaacttgcccataagctgaagaatgaaggcaaatccgttgtgctcgctgccggagacactttcagagccggggcgattgaacagcttgaagtgtggggggagcgtacaggcgtgcctgtcattaagcaggctgccggaagcgaccctgcggcggttatttatgatgccgtacacgcggctaaagcaagaggagcggatgtgctgatttgtgatacggccggccgccttcagaataaagttaacttaatgaaagagcttgaaaaggtcaaacgcgtcattgaacgcgaagtgcctgaggccccgcatgaggttctccttgcgctggacgcgacgacaggccagaatgcgatggcgcaggcgaaagaattctccaaagcgacgaatgtgacgggtatcgcattaacgaagcttgacggcaccgcaaaaggcggtatcgtcctggcgatccgcaatgagcttcacatccctgtgaaactggtcggcctcggagaaaaggttgacgatctccagcggtttgatgcagaatcttacgtatacggtctcttttcggatttagttgaaaaagccgaagattaatgaataaaaaacgagtataaaatggacggttttatactcgtttttttatacgcattgatagatcggaatggaggggcagttgttggacaaatggctgaaagctgaattggaaagtaagatcggcgcgataaaccatatgtcgctgctggatgaacagggaggcacttcaaccgttcgaaaaatagtgaccggtcaagacgcatttttgctgaaaagttcttttcaacagaagtatcgggaatggttaatgagagaagccttcgttttacaacaactgacggaaactcgtcgtctgcctgttcctatttactatgggatgatacaggaacagcatgccagccatatcatcatgtcatttgaggatggaatcaccctgacttcggctttaagaaaagccaaaggggatactgaaaagaaaaagctgatcaaaagtttcggccagtttctgcagcggctgcatgaaaccgaaatggtctctggtttacagccggaaacagactggctcgatctgcaaatcaaacgagccggggaatatgtcaaaaaaggacaagctgaaggaagtgcagagcttttgaaggaattggacaggtacaggcctgttcctgttcagcagacaatgattcacggtgactgcacgactgataatgtgctggtgagagacggagaggtctatctgtttatcgatgctgcgggaatatcggcgggagatccgcgttatgatgaatcattagcgatcagtcgttttgtcacaaatgaatcatgtctcaatgctttttacgaaggctattgccgctatcgtgtatcaaaacaagaattcgagtattttaacgacggtctgtatgaatttttttgaaaacacttattatgtaaaaagagcatcctgctttgacaagataaaaacttgacacacgctctgaaaccatgtaaactaagtttttgtaaagggatttgacttaacaaaggggagagctcaaatgtcgctcgaaaaaacgacgagaatgaactatttgtttgacttctatcagtcgttgctgacgtcaaaacaaaagagctatatgtcgctttattatctggacgatttctcccttggtgaaatagccgaagagtatgacgtttcaaggcaagccgtttacgataacatcaaacggactgaagcgatgcttgaacaatatgaagaaaaactgctcctttttaaaaagtttcaggagcgtaaagaaatgtttacaaagctgaaagagcttgcttccggcttgcaggaagaggaaaaaatgacggctctgattgaagcgcttgagaaattagattaggaggcggcaaacaatggcatttgaaggattagccgaccgactgcaaaagacgatttcaaaaatccgcggaaaaggaaaagtcagcgaacaagacgtaaaagagatgatgcgtgaagtccgtcttgcgcttcttgaggctgacgttaactttaaagtcgtaaaggattttgtgaaaaaagtaagtgaacgggctgtcgggcaggacgtcatgcagagtctgacacccggtcagcaggttattaaagtcgtaaaagaagagcttaccgagctgatgggcggcgaagaaagcaaaattgccgccgccaaacgcccgccgaccgttattatgatggtcgggctccaaggtgccggtaaaacgacaaccacggggaagcttgccaacctgctgcgcaaaaaacataaccgcaaaccgctgctcgtggctgcggatatttaccgccccgccgcgattaaacagctggaaacactggggaaacagcttgatatgccggtcttttcgcttggcgatcaggtcagcccggtggaaattgccagacaggcgattgaaaaagcgaaggaagagcatcatgattatgtgattttagataccgccggacggctgcacatcgatcatgaactgatggatgagctctccggcgtaaaggaagtcgcaaatcctgaggaaattttccttgtcgtcgactcaatgaccggtcaggatgcggtaaacgtcgccaaaagctttaatgaccagctcggtttaacgggcgtcattttaacaaagcttgacggggatacccgcggaggtgcggcgctttctatccgcgcggtcaccgaaacgccgattaaattcgccggaatgggagaaaagctcgatgctcttgaagcgttccatcctgaacggatggcatcccggattctcggaatgggtgacgtgctgacgctgattgaaaaagctcaggcgaccgttgatgaagacaaagccaaagagcttgagcagaaaatgagaacgatgagcttcacattggatgattttctggagcagctcggccaggtccgaaacatggggcctcttgacgaactgctgcaaatgatgcccggagcaggcaaaatgaaaggcttaaaaaacatccaagtcgatgaaaaacagctgaatcatgtggaagcgatcattaaatcaatgactgttcttgaaaaagaacagccggatattattaacgccagccggcggaagcggattgccaaaggaagcggaacatccgttcaggaagtcaaccgtcttttaaagcagtttgaggaaatgaaaaaaatgatgaagcagatgaccaacatgtcaaaagggaagaaaaaaggctttaaattaccttttatgtaatcggttatacatgataaaaccgttgttaagaaaaaacactttacaaacacttttatcattgttaatatactatcttgttgaaatattttcggaggtgctagtaaaatggcagtaaaaattcgtttaaaacgtatgggagcaaaaaaatctcctttctatcgtattgttgtagcagattctcgttcaccgcgtgacggccgtttcatcgaaacagtcggcacatacaacccggttgcaaagccggctgaagtgaaaatcaatgaagagcttgctcttaaatggcttcaaacaggagctaaaccttctgatacagtccgcaacttgttctcaagccaaggaattatggaaaaattccacaacgctaaacaaggcaagtaatgactgatcagaacttggaagatttgattgtcagcattgtggctccgcttgtcgaccatccggaagacataacggtcacaaaggaagagactgatcaaaagattgcgctacgcttatctgtcaataagtcggataccggtaagattatcggaaagcaaggccggactgcaagagcgattcgaaccgtcgtttttgcagctggcgcacagtcttctaagaaagttcaatttgaaatatttgactgaaaaagggagagggccggcacctcccctttttttacacgt
